(19) United States
(12) Patent Application Publication
(10) Pub. No.: US 2021/0363200 A1
(43) Pub. Date: Nov. 25, 2021

(54) LYSM RECEPTOR MOTIFS

(71) Applicant: Aarhus Universitet, Aarhus (DK)

(72) Inventors: Simona RADUTOIU, Aarhus (DK); Kasper Røjkjær ANDERSEN, Aarhus (DK); Jens STOUGAARD, Aarhus (DK); Damiano LIRONI, Aarhus (DK); Christina KRÖNAUER, Aarhus (DK); Mette LAURSEN, Aarhus (DK)

(73) Assignee: Aarhus Universitet, Aarhus (DK)

(21) Appl. No.: 17/324,354

(22) Filed: May 19, 2021

Related U.S. Application Data
(60) Provisional application No. 63/027,151, filed on May 19, 2020.

(51) Int. Cl. C07K 14/415; C07K 1/107; A01H 1/00

(52) U.S. Cl. CPC C07K 14/415; A01H 1/102; C07K 1/107

(57) ABSTRACT

Aspects of the present disclosure relate to genetically altered LysM receptors. In particular, the present disclosure relates replacement of part or all of motifs in the LysM1 domain with the corresponding motifs of the LysM1 domain from a donor LysM receptor that can alter the affinity, selectivity, and/or specificity for an oligosaccharide, particularly for Nod factors (lipochitooligosaccharides (LCOs)). The present disclosure also relates to genetically altering LysM receptors in plants to include a modified LysM1 domain and to genetically altering LysM receptors in plants by replacement of part or all of motifs in the LysM1 domain. The present disclosure further relates to combining LysM1 domain modifications with modifications of LysM2 domains to include a hydrophobic patch or alter the hydrophobic patch, whereby the LysM2 domain modifications can alter the affinity, selectivity, and/or specificity for an oligosaccharide, particularly for Nod factors (lipochitooligosaccharides (LCOs)).

### CROSS-REFERENCE TO RELATED APPLICATION

[0001] This application claims the benefit of U.S. Provisional Application No. 63/027,151, filed May 19, 2020, which is hereby incorporated by reference in its entirety.

### SUBMISSION OF SEQUENCE LISTING AS ASCII TEXT FILE

[0002] The content of the following submission on ASCII text file is incorporated herein by reference in its entirety: a computer readable form (CRF) of the Sequence Listing (file name: 794542001240SEQLIST.TXT, date recorded: May 3, 2021, size: 593 KB).

### TECHNICAL FIELD

[0003] The present disclosure relates to genetically altered LysM receptors. In particular, the present disclosure relates replacement of part or all of motifs in the LysM1 domain with the corresponding motifs of the LysM1 domain from a donor LysM receptor that can alter the affinity, selectivity, and/or specificity for an oligosaccharide, particularly for Nod factors (lipochitooligosaccharides (LCOs)). The present disclosure also relates to genetically altering LysM receptors in plants to include a modified LysM1 domain and to genetically altering LysM receptors in plants by replacement of part or all of motifs in the LysM1 domain. The present disclosure further relates to combining LysM1 domain modifications with modifications of LysM2 domains to include a hydrophobic patch or alter the hydrophobic patch, whereby the LysM2 domain modifications can alter the affinity, selectivity, and/or specificity for an oligosaccharide, particularly for Nod factors (lipochitooligosaccharides (LCOs)).

### BACKGROUND

[0004] Plants are exposed to a wide variety of microbes in their environment, both benign and pathogenic. To protect against the pathogenic microbes, plants have the ability to recognize specific molecular signals of the microbes through an array of receptors and, depending upon the pattern of the signals, can initiate an appropriate immune response. The molecular signals are derived from secreted materials, cell-wall components, and even cytosolic proteins of the microbes. Chitins (chitooligosaccharides (COs)) are an important fungal molecular signal that plants recognize through the chitin receptors such as CERK6, which are found on the plasma membrane. These receptors are in the LysM class of receptors and recognize the size and the acetylation of chitins from fungi. Nod factors (lipochitooligosaccharides (LCOs)) are another important molecular signal that can be found on both bacteria and fungi that are recognized by other LysM receptors.

[0005] In addition to benign and pathogenic microbes, some microbes can be beneficial to plants through association or symbiosis. Plants that enter into symbiotic relationships with certain nitrogen fixing bacteria and fungi need to be able to recognize the specific bacterial or fungal species to initiate the symbiosis while still being able to activate their immune systems to respond to other bacteria and fungi. One important mechanism that allows plants to recognize these specific bacteria or fungi is through specialized LysM Nod factor receptors that have high affinity, high selectivity, and/or high specificity for the form of Nod factors produced by the specific bacteria or fungi while Nod factors from other bacteria and fungi are not recognized by these specialized LysM receptors.

[0006] Experimental and computational approaches have been used to identify a number of these specialized LysM Nod factor receptors. As these receptors are required for recognizing symbiotic bacterial and fungal species, and for initiating symbiosis, these receptors represent an important component of any plant engineering strategy. Using these receptors, however, will not be particularly straightforward; transferring a specialized LysM Nod factor receptor into a plant that does not currently have one may require codon optimization, the identification of suitable promoters, the use of targeting signals, and further engineering approaches needed to adapt exogenous sequences for optimal expression. Further, the number of these receptors that have been identified is currently limited.

[0007] Moreover, species that already have specialized LysM Nod factor receptors, e.g., legumes, cannot be easily engineered with new specialized LysM receptors. Currently, legumes are limited to the specific bacterial or fungal species with which they form symbiotic associations. While legumes may have the benefit of existing symbiotic associations, their agricultural potential is limited. For example, legumes cannot currently be easily engineered to have different specificity for different symbiotic microbial species, which would allow legumes to better form associations with the bacterial or fungal species in different soils. Moreover, legumes cannot be easily engineered to have improved specialized LysM Nod factor receptors. Further, legumes cannot currently be engineered to have synergistic symbiotic requirements with other crops grown in rotation with them. Editing approaches are needed for both the modification of endogenous LysM receptors into specialized LysM Nod factor receptors able to perceive symbiotic bacterial and fungal species, and the modification of specialized LysM Nod factor receptors into specialized LysM Nod factor receptors with different specific recognition of symbiotic bacterial and fungal species. In particular, minimal editing approaches are needed, in which a small number of changes can be made to alter or improve the properties of existing LysM receptors.

### BRIEF SUMMARY

[0008] In order to meet these needs, the present disclosure provides means of modifying LysM receptors by replacement of part or all of minimal motifs in the LysM1 domain with the corresponding motifs of the LysM1 domain from a donor LysM receptor that can alter or improve the affinity, selectivity, and/or specificity for an oligosaccharide, particularly for Nod factors (LCOs). In addition, the present disclosure provides complementary means of modifying LysM receptors by introduction of a hydrophobic patch into the LysM2 domain which can alter or improve affinity, selectivity, and/or specificity for Nod factors.

[0009] An aspect of the disclosure includes a modified plant LysM receptor polypeptide including a LysM1 domain including a first motif and a second motif, wherein the first motif and/or the second motif are modified as compared to the amino acid sequences of the corresponding wild-type plant LysM receptor polypeptide. An additional embodiment of this aspect includes the first motif corresponding to amino acids 42-48 of SEQ ID NO: 162 when the receptor polypeptide amino acid sequence is aligned to SEQ ID NO: 162 and the second motif corresponding to amino acids 75-80 of SEQ ID NO: 162 when the receptor polypeptide amino acid sequence is aligned to SEQ ID NO: 162. A further embodiment of this aspect includes the first motif corresponding to amino acids 44-49 of SEQ ID NO: 164 when the receptor polypeptide amino acid sequence is aligned to SEQ ID NO: 164 and the second motif corresponding to amino acids 76-81 of SEQ ID NO: 164 when the receptor polypeptide amino acid sequence is aligned to SEQ ID NO: 164. In yet another embodiment of this aspect, which may be combined with any of the preceding embodiments, the first motif is modified by substituting at least one, at least two, or at least three amino acid residues in the first motif with corresponding amino acid residues that are different in a third motif, and/or the second motif is modified by substituting at least one, at least two, or at least three amino acid residues in the second motif with corresponding amino acid residues that are different in a fourth motif. In still another embodiment of this aspect, which may be combined with any of the preceding embodiments, the first motif is modified by substituting the first motif with a third motif, and/or wherein the second motif is modified by substituting the second motif with a fourth motif. An additional embodiment of this aspect, which may be combined with any of the preceding embodiments that has the third motif and the fourth motif, includes the third motif and the fourth motif having different affinities, selectivities, and/or specificities for oligosaccharides than the first motif and the second motif. A further embodiment of this aspect includes the third motif and the fourth motif have different affinities for oligosaccharides than the first motif and the second motif. Yet another embodiment of this aspect includes the third motif and the fourth motif having different selectivities for oligosaccharides than the first motif and the second motif. Still another embodiment of this aspect includes the third motif and the fourth motif having different specificities for oligosaccharides than the first motif and the second motif. In a further embodiment of this aspect, which may be combined with any of the preceding embodiments that has the third motif and the fourth motif, the third motif and the fourth motif are from a second plant LysM receptor polypeptide having the different affinity, selectivity and/or specificity for oligosaccharides and the third motif corresponds to amino acids 42-48 of SEQ ID NO: 162 when the second plant LysM polypeptide amino acid sequence is aligned to SEQ ID NO: 162 and the fourth motif corresponds to amino acids 75-80 of SEQ ID NO: 162 when the second plant LysM polypeptide amino acid sequence is aligned to SEQ ID NO: 162. In an additional embodiment of this aspect, which may be combined with any of the preceding embodiments that has the third motif and the fourth motif, the third motif and the fourth motif are from a second plant LysM receptor polypeptide having the different affinity, selectivity and/or specificity for oligosaccharides and the third motif corresponds to amino acids 44-49 of SEQ ID NO: 164 when the second plant LysM polypeptide amino acid sequence is aligned to SEQ ID NO: 164 and the fourth motif corresponds to amino acids 76-81 of SEQ ID NO: 164 when the second plant LysM polypeptide amino acid sequence is aligned to SEQ ID NO: 164. In yet another embodiment of this aspect, which may be combined with any of the preceding embodiments that has the third motif and the fourth motif being from a second plant LysM receptor polypeptide having the different affinity, selectivity and/or specificity for oligosaccharides, at least one amino acid residue in flanking regions of the receptor polypeptide is different than the corresponding amino acid in the flanking regions of the second plant LysM receptor polypeptide and the flanking regions correspond to amino acids 41, 49-52, 73-74, and 81 of SEQ ID NO: 162, amino acids 47-53, 66-74, and 81-82 of SEQ ID NO: 163, and/or amino acids 43, 50-53, 74-75, and 82 of SEQ ID NO: 164.

[0010] In an additional embodiment of this aspect, which may be combined with any of the preceding embodiments, the first motif includes SEQ ID NO: 1, SEQ ID NO: 2, SEQ ID NO: 3, SEQ ID NO: 4, SEQ ID NO: 5, SEQ ID NO: 6, SEQ ID NO: 7, SEQ ID NO: 8, SEQ ID NO: 9, SEQ ID NO: 10, SEQ ID NO: 11, SEQ ID NO: 12, SEQ ID NO: 13, SEQ ID NO: 14, SEQ ID NO: 15, SEQ ID NO: 16, SEQ ID NO: 17, SEQ ID NO: 18, SEQ ID NO: 19, SEQ ID NO: 20, SEQ ID NO: 21, SEQ ID NO: 22, SEQ ID NO: 23, SEQ ID NO: 24, SEQ ID NO: 25, SEQ ID NO: 26, SEQ ID NO: 53, SEQ ID NO: 54, SEQ ID NO: 55, SEQ ID NO: 59, SEQ ID NO: 60, SEQ ID NO: 61, SEQ ID NO: 62, SEQ ID NO: 63, SEQ ID NO: 64, SEQ ID NO: 65, SEQ ID NO: 66, SEQ ID NO: 67, SEQ ID NO: 68, SEQ ID NO: 79, SEQ ID NO: 80, SEQ ID NO: 81, SEQ ID NO: 82, SEQ ID NO: 83, SEQ ID NO: 84, SEQ ID NO: 85, SEQ ID NO: 86, SEQ ID NO: 87, SEQ ID NO: 88, SEQ ID NO: 89, SEQ ID NO: 90, SEQ ID NO: 91, SEQ ID NO: 92, SEQ ID NO: 93, SEQ ID NO: 94, SEQ ID NO: 95, SEQ ID NO: 96, SEQ ID NO: 97, SEQ ID NO: 98, SEQ ID NO: 99, SEQ ID NO: 143, or SEQ ID NO: 341. In a further embodiment of this aspect, which may be combined with any of the preceding embodiments, the first motif includes SEQ ID NO: 27, SEQ ID NO: 28, SEQ ID NO: 29, SEQ ID NO: 30, SEQ ID NO: 31, SEQ ID NO: 32, SEQ ID NO: 33, SEQ ID NO: 34, SEQ ID NO: 35, SEQ ID NO: 36, SEQ ID NO: 37, SEQ ID NO: 38, SEQ ID NO: 39, SEQ ID NO: 40, SEQ ID NO: 41, SEQ ID NO: 42, SEQ ID NO: 43, SEQ ID NO: 44, SEQ ID NO: 45, SEQ ID NO: 46, SEQ ID NO: 47, SEQ ID NO: 48, SEQ ID NO: 49, SEQ ID NO: 50, SEQ ID NO: 51, SEQ ID NO: 52, SEQ ID NO: 56, SEQ ID NO: 57, SEQ ID NO: 58, SEQ ID NO: 69, SEQ ID NO: 70, SEQ ID NO: 71, SEQ ID NO: 72, SEQ ID NO: 73, SEQ ID NO: 74, SEQ ID NO: 75, SEQ ID NO: 76, SEQ ID NO: 77, SEQ ID NO: 78, SEQ ID NO: 121, SEQ ID NO: 122, SEQ ID NO: 123, SEQ ID NO: 124, SEQ ID NO: 125, SEQ ID NO: 126, SEQ ID NO: 127, SEQ ID NO: 128, SEQ ID NO: 129, SEQ ID NO: 130, SEQ ID NO: 131, SEQ ID NO: 132, SEQ ID NO: 133, SEQ ID NO: 134, SEQ ID NO: 135, SEQ ID NO: 136, SEQ ID NO: 137, SEQ ID NO: 138, SEQ ID NO: 139, SEQ ID NO: 140, SEQ ID NO: 141, or SEQ ID NO: 142. In yet another embodiment of this aspect, the third motif includes SEQ ID NO: 1, SEQ ID NO: 2, SEQ ID NO: 3, SEQ ID NO: 4, SEQ ID NO: 5, SEQ ID NO: 6, SEQ ID NO: 7, SEQ ID NO: 8, SEQ ID NO: 9, SEQ ID NO: 10, SEQ ID NO: 11, SEQ ID NO: 12, SEQ ID NO: 13, SEQ ID NO: 14, SEQ ID NO: 15, SEQ ID NO: 16, SEQ ID NO: 17, SEQ ID NO: 18, SEQ ID NO: 19, SEQ ID NO: 20, SEQ ID NO: 21, SEQ ID NO: 22, SEQ ID NO: 23, SEQ ID NO: 24, SEQ ID NO: 25, SEQ ID NO: 26, SEQ ID NO: 53, SEQ ID NO: 54, SEQ ID NO: 55, SEQ ID NO: 59, SEQ ID NO: 60, SEQ ID NO: 61, SEQ ID NO: 62, SEQ ID NO: 63, SEQ ID NO: 64, SEQ ID NO: 65, SEQ ID NO: 66, SEQ ID NO: 67, SEQ ID NO: 68, SEQ ID NO: 79, SEQ ID NO: 80, SEQ ID NO: 81, SEQ ID NO: 82, SEQ ID NO: 83, SEQ ID NO: 84, SEQ ID NO: 85, SEQ ID NO: 86, SEQ ID NO: 87, SEQ ID NO: 88, SEQ ID NO: 89, SEQ ID NO: 90, SEQ ID NO: 91, SEQ ID NO: 92, SEQ ID NO: 93, SEQ ID NO: 94, SEQ ID NO: 95, SEQ ID NO: 96, SEQ ID NO: 97, SEQ ID NO: 98, SEQ ID NO: 99, SEQ ID NO: 143, or SEQ ID NO: 341, and the first motif and the third motif are different. In still another embodiment of this aspect, the fourth motif includes SEQ ID NO: 27, SEQ ID NO: 28, SEQ ID NO: 29, SEQ ID NO: 30, SEQ ID NO: 31, SEQ ID NO: 32, SEQ ID NO: 33, SEQ ID NO: 34, SEQ ID NO: 35, SEQ ID NO: 36, SEQ ID NO: 37, SEQ ID NO: 38, SEQ ID NO: 39, SEQ ID NO: 40, SEQ ID NO: 41, SEQ ID NO: 42, SEQ ID NO: 43, SEQ ID NO: 44, SEQ ID NO: 45, SEQ ID NO: 46, SEQ ID NO: 47, SEQ ID NO: 48, SEQ ID NO: 49, SEQ ID NO: 50, SEQ ID NO: 51, SEQ ID NO: 52, SEQ ID NO: 56, SEQ ID NO: 57, SEQ ID NO: 58, SEQ ID NO: 69, SEQ ID NO: 70, SEQ ID NO: 71, SEQ ID NO: 72, SEQ ID NO: 73, SEQ ID NO: 74, SEQ ID NO: 75, SEQ ID NO: 76, SEQ ID NO: 77, SEQ ID NO: 78, SEQ ID NO: 121, SEQ ID NO: 122, SEQ ID NO: 123, SEQ ID NO: 124, SEQ ID NO: 125, SEQ ID NO: 126, SEQ ID NO: 127, SEQ ID NO: 128, SEQ ID NO: 129, SEQ ID NO: 130, SEQ ID NO: 131, SEQ ID NO: 132, SEQ ID NO: 133, SEQ ID NO: 134, SEQ ID NO: 135, SEQ ID NO: 136, SEQ ID NO: 137, SEQ ID NO: 138, SEQ ID NO: 139, SEQ ID NO: 140, SEQ ID NO: 141, or SEQ ID NO: 142, and the second motif and the fourth motif are different.

[0011] Yet another embodiment of this aspect, which may be combined with any of the preceding embodiments, further includes a fifth motif in the LysM1 domain, wherein the fifth motif is modified. An additional embodiment of this aspect includes the fifth motif corresponding to amino acids 56-65 of SEQ ID NO: 162 when the receptor polypeptide amino acid sequence is aligned to SEQ ID NO: 162. In still another embodiment of this aspect, which may be combined with any of the preceding embodiments that has a fifth motif, the fifth motif is modified by substituting at least one, at least two, or at least three amino acid residues in the fifth motif with corresponding amino acid residues that are different in a sixth motif. In yet another embodiment of this aspect, which may be combined with any of the preceding embodiments that has a fifth motif, the fifth motif is substituted with a sixth motif. A further embodiment of this aspect, which may be combined with any of the preceding embodiments that has a sixth motif, includes the sixth motif being from a second plant LysM receptor polypeptide having the different specificity for oligosaccharides and the sixth motif corresponding to amino acids 56-65 of SEQ ID NO: 162 when the second plant LysM polypeptide amino acid sequence is aligned to SEQ ID NO: 162. In still another embodiment of this aspect, which may be combined with any of the preceding embodiments that has a fifth motif, the fifth motif includes SEQ ID NO: 100, SEQ ID NO: 101, SEQ ID NO: 102, SEQ ID NO: 103, SEQ ID NO: 104, SEQ ID NO: 105, SEQ ID NO: 106, SEQ ID NO: 107, SEQ ID NO: 108, SEQ ID NO: 109, SEQ ID NO: 110, SEQ ID NO: 111, SEQ ID NO: 112, SEQ ID NO: 113, SEQ ID NO: 114, SEQ ID NO: 115, SEQ ID NO: 116, SEQ ID NO: 117, SEQ ID NO: 118, SEQ ID NO: 119, or SEQ ID NO: 120. In yet another embodiment of this aspect, which may be combined with any of the preceding embodiments that has a sixth motif, the sixth motif includes SEQ ID NO: 100, SEQ ID NO: 101, SEQ ID NO: 102, SEQ ID NO: 103, SEQ ID NO: 104, SEQ ID NO: 105, SEQ ID NO: 106, SEQ ID NO: 107, SEQ ID NO: 108, SEQ ID NO: 109, SEQ ID NO: 110, SEQ ID NO: 111, SEQ ID NO: 112, SEQ ID NO: 113, SEQ ID NO: 114, SEQ ID NO: 115, SEQ ID NO: 116, SEQ ID NO: 117, SEQ ID NO: 118, SEQ ID NO: 119, or SEQ ID NO: 120, and the fifth motif and the sixth motif are different.

[0012] Still another embodiment of this aspect, which may be combined with any of the preceding embodiments, includes the modified receptor polypeptide binding one or more Nod factors produced by nitrogen-fixing bacteria or by mycorrhizal fungi. An additional embodiment of this aspect, includes the one or more Nod factors being produced by nitrogen-fixing bacteria selected from the group of Mesorhizobium loti, Mesorhizobium huakuii, Mesorhizobium mediterraneum, Mesorhizobium ciceri, Mesorhizobium spp., Rhizobium mongolense, Rhizobium tropici, Rhizobium etli phaseoli, Rhizobium giardinii, Rhizobium leguminosarum optionally R. leguminosarum trifolii, R. leguminosarum viciae, and R. leguminosarum phaseoli, Burkholderiales optionally symbionts of Mimosa, Sinorhizobium meliloti, Sinorhizobium medicae, Sinorhizobium fredii, Sinorhizobium NGR234, Azorhizobium caulinodans, Bradyrhizobium japonicum, Bradyrhizobium elkanii, Bradyrhizobium liaonginense, Frankia spp., or any combination thereof, or by mycorrhizal fungi selected from the group of Acaulosporaceae spp., Diversisporaceae spp., Gigasporaceae spp., Pacisporaceae spp., Funneliformis spp., Glomus spp., Rhizophagus spp., Sclerocystis spp., Septoglomus spp., Claroideoglomus spp., Ambispora spp., Archaeospora spp., Geosiphon pyriformis, Paraglomus spp., other species in the division Glomeromycota, or any combination thereof. A further embodiment of this aspect, which may be combined with any preceding embodiment that has one or more Nod factors produced by nitrogen-fixing bacteria or by mycorrhizal fungi, includes the modified receptor polypeptide binding one or more Nod factors with higher affinity than an unmodified receptor polypeptide. Yet another embodiment of this aspect, which may be combined with any preceding embodiment that has one or more Nod factors produced by nitrogen-fixing bacteria or by mycorrhizal fungi, includes the modified receptor polypeptide binding one or more Nod factors with higher selectivity than an unmodified receptor polypeptide. Still another embodiment of this aspect, which may be combined with any preceding embodiment that has one or more Nod factors produced by nitrogen-fixing bacteria or by mycorrhizal fungi, includes the modified receptor polypeptide binding one or more Nod factors with altered specificity as compared to an unmodified receptor polypeptide.

[0013] Yet another embodiment of this aspect, which may be combined with any of the preceding embodiments, further includes a LysM2 domain modified to include a hydrophobic patch on the surface of the LysM2 domain, wherein the modified plant LysM receptor polypeptide has enhanced affinity, selectivity, and/or specificity for one or more one or more Nod factors as compared to the unmodified plant LysM receptor polypeptide. An additional embodiment of this aspect includes the hydrophobic patch being within 30 Å, 20 Å, 10 Å, 7.5 Å, 5 Å, 4 Å, 3 Å, 2 Å, 1.5 Å, or 1 Å of a chitin binding motif. In a further embodiment of this aspect, which may be combined with any preceding embodiment that has a modified LysM2 domain, the LysM2 domain includes SEQ ID NO: 278, SEQ ID NO: 279, SEQ ID NO: 280, SEQ ID NO: 281, SEQ ID NO: 282, SEQ ID NO: 283, SEQ ID NO: 284, SEQ ID NO: 285, SEQ ID NO: 286, SEQ ID NO: 287, SEQ ID NO: 288, SEQ ID NO: 289, SEQ ID NO: 290, SEQ ID NO: 291, SEQ ID NO: 292, SEQ ID NO: 293, SEQ ID NO: 294, SEQ ID NO: 295, SEQ ID NO: 296, SEQ ID NO: 297, SEQ ID NO: 298, SEQ ID NO: 299, or SEQ ID NO: 300. In yet another embodiment of this aspect, which may be combined with any preceding embodiment that has a modified LysM2 domain, the hydrophobic patch was generated by deleting at least one non-hydrophobic amino acid residue, substituting at least one amino acid residue with a more hydrophobic amino acid, or combinations thereof. Still another embodiment of this aspect, which may be combined with any preceding embodiment that has a LysM2 domain, includes the at least one amino acid being identified by an amino acid sequence alignment with a LysM2 domain from a LysM high affinity Nod factor receptor that naturally has a hydrophobic patch that interacts with a Nod factor. In an additional embodiment of this aspect, the LysM2 domain from a LysM high affinity Nod factor receptor includes SEQ ID NO: 271, SEQ ID NO: 272, SEQ ID NO: 273, SEQ ID NO: 274, SEQ ID NO: 275, SEQ ID NO: 276, or SEQ ID NO: 277. In a further embodiment of this aspect, which may be combined with any preceding embodiment that has a LysM2 domain from a LysM high affinity Nod factor receptor, the at least one amino acid corresponds to the hydrophobic patch residues from SEQ ID NO: 223, SEQ ID NO: 249, SEQ ID NO: 250, SEQ ID NO: 251, SEQ ID NO: 254, SEQ ID NO: 257, or SEQ ID NO: 258.

[0014] Yet another embodiment of this aspect, which may be combined with any preceding embodiment where the hydrophobic patch was generated by deleting at least one non-hydrophobic amino acid residue, includes the at least one amino acid being identified by structural modeling to identify a region in LysM2 where the hydrophobic patch can be engineered. A further embodiment of this aspect includes the structural modeling using the unmodified plant LysM amino acid sequence and a LysM domain three dimensional structure that has a known hydrophobic patch. An additional embodiment of this aspect includes the LysM domain three dimensional structure being a Medicago truncatula NFP ectodomain. Still another embodiment of this aspect, which may be combined with any preceding embodiment that has a LysM domain three dimensional structure that has a known hydrophobic patch, includes the known hydrophobic patch amino acid residues of the LysM domain three dimensional structure being or correspond to L147, L151, L152, L154, T156, K157 and V158 of the Medicago truncatula NFP ectodomain. A further embodiment of this aspect includes the alpha carbon of at least one amino acid being within 3 Å of an alpha carbon of a known hydrophobic patch amino acid residue in the structural alignment. Yet another embodiment of this aspect, which may be combined with any preceding embodiment that has structural modeling, includes the structural modeling being performed using SWISS-MODEL, PDB2PQR, APBS, PyMol, and APBS tools 2.1. Still another embodiment of this aspect, which may be combined with any preceding embodiment that has a modified LysM2 domain, includes the modified receptor polypeptide binding one or more Nod factors produced by nitrogen-fixing bacteria or by mycorrhizal fungi. A further embodiment of this aspect includes the one or more Nod factors being produced by nitrogen-fixing bacteria selected from the group of Mesorhizobium loti, Mesorhizobium huakuii, Mesorhizobium mediterraneum, Mesorhizobium ciceri, Mesorhizobium spp., Rhizobium mongolense, Rhizobium tropici, Rhizobium etli phaseoli, Rhizobium giardinii, Rhizobium leguminosarum optionally R. leguminosarum trifolii, R. leguminosarum viciae, and R. leguminosarum phaseoli, Burkholderiales optionally symbionts of Mimosa, Sinorhizobium meliloti, Sinorhizobium medicae, Sinorhizobium fredii, Sinorhizobium NGR234, Azorhizobium caulinodans, Bradyrhizobium japonicum, Bradyrhizobium elkanii, Bradyrhizobium liaonginense, Frankia spp., or any combination thereof, or by mycorrhizal fungi selected from the group of Acaulosporaceae spp., Diversisporaceae spp., Gigasporaceae spp., Pacisporaceae spp., Funneliformis spp., Glomus spp., Rhizophagus spp., Sclerocystis spp., Septoglomus spp., Claroideoglomus spp., Ambispora spp., Archaeospora spp., Geosiphon pyriformis, Paraglomus spp., other species in the division Glomeromycota, or any combination thereof. An additional embodiment of this aspect, which may be combined with any preceding embodiment that has one or more Nod factors produced by nitrogen-fixing bacteria or by mycorrhizal fungi, includes the modified receptor polypeptide binding one or more Nod factors with higher affinity than an unmodified receptor polypeptide. In yet another embodiment of this aspect, which may be combined with any preceding embodiment that has one or more Nod factors produced by nitrogen-fixing bacteria or by mycorrhizal fungi, the modified receptor polypeptide binds one or more Nod factors with higher selectivity than an unmodified receptor polypeptide. In still another embodiment of this aspect, which may be combined with any preceding embodiment that has one or more Nod factors produced by nitrogen-fixing bacteria or by mycorrhizal fungi, the modified receptor polypeptide binds one or more Nod factors with altered specificity as compared to an unmodified receptor polypeptide.

[0015] A further aspect of the present disclosure includes a genetically altered plant or part thereof including the modified LysM receptor polypeptide of any one of the preceding embodiments. An additional embodiment of this aspect includes the modified LysM receptor polypeptide having higher affinity, higher selectivity, and/or altered specificity for one or more Nod factors than an unmodified LysM receptor polypeptide and the expression of the modified LysM receptor polypeptide allowing the plant or part thereof to recognize one or more Nod factors with high affinity, high selectivity, and/or altered specificity. Yet another embodiment of this aspect, which may be combined with any one of the preceding embodiments, includes the one or more Nod factors are produced by nitrogen-fixing bacteria or by mycorrhizal fungi. A further embodiment of this aspect includes the one or more Nod factors produced by nitrogen-fixing bacteria being selected from the group of Mesorhizobium loti, Mesorhizobium huakuii, Mesorhizobium mediterraneum, Mesorhizobium ciceri, Mesorhizobium spp., Rhizobium mongolense, Rhizobium tropici, Rhizobium etli phaseoli, Rhizobium giardinii, Rhizobium leguminosarum optionally R. leguminosarum trifolii, R. leguminosarum viciae, and R. leguminosarum phaseoli, Burkholderiales optionally symbionts of Mimosa, Sinorhizobium meliloti, Sinorhizobium medicae, Sinorhizobium fredii, Sinorhizobium NGR234, Azorhizobium caulinodans, Bradyrhizobium japonicum, Bradyrhizobium elkanii, Bradyrhizobium liaonginense, Frankia spp., or any combination thereof, or by mycorrhizal fungi selected from the group of Acaulosporaceae spp., Diversisporaceae spp., Gigasporaceae spp., Pacisporaceae spp., Funneliformis spp., Glomus spp., Rhizophagus spp., Sclerocystis spp., Septoglomus spp., Claroideoglomus spp., Ambispora spp., Archaeospora spp., Geosiphon pyriformis, Paraglomus spp., other species in the division Glomeromycota, or any combination thereof. Still another embodiment of this aspect, which may be combined with any one of the preceding embodiments, includes the modified LysM receptor polypeptide being localized to a plant cell plasma membrane. Yet another embodiment of this aspect includes the plant cell being a root cell. An additional embodiment of this aspect includes the root cell being a root epidermal cell. A further embodiment of this aspect, which may be combined with any of the preceding embodiments includes the modified LysM receptor polypeptide being expressed in a developing plant root system. An additional embodiment of this aspect, which may be combined with any of the preceding embodiments, includes a nucleic acid sequence encoding the modified LysM receptor polypeptide, wherein the nucleic acid sequence is operably linked to a promoter. Still another embodiment of this aspect includes the promoter being a root specific promoter, a constitutive promoter, or a combination thereof. In yet another embodiment of this aspect, which may be combined with any preceding embodiment that has a promoter, the promoter is selected from the group of a NFR1 promoter, a NFR5/NFP promoter, a LYK3 promoter, a CERK6 promoter, a NFR5/NFP promoter, a Lotus japonicus NFR5 promoter (SEQ ID NO: 261), a Lotus japonicus NFR1 promoter (SEQ ID NO: 261), a Lotus japonicus CERK6 promoter (SEQ ID NO: 264), a Medicago truncatula NFP promoter (SEQ ID NO: 263), a Medicago truncatula LYK3 promoter (SEQ ID NO: 262), a maize allothioneine promoter, a chitinase promoter, a maize ZRP2 promoter, a tomato LeExtl promoter, a glutamine synthetase soybean root promoter, a RCC3 promoter, a rice antiquitine promoter, a LRR receptor kinase promoter, or an Arabidopsis pCO2 promoter. In an additional embodiment of this aspect, which may be combined with any preceding embodiment that has a promoter, the promoter is selected from the group of a CaMV35S promoter, a derivative of the CaMV35S promoter, a maize ubiquitin promoter, a trefoil promoter, a vein mosaic cassava virus promoter, or an Arabidopsis UBQ10 promoter.

[0016] An additional aspect of the present disclosure includes a genetically altered plant or part thereof including a first modified LysM receptor polypeptide of any one of the preceding embodiments and a second modified LysM receptor polypeptide including a LysM2 domain modified to include a hydrophobic patch on the surface of the LysM2 domain, wherein the second modified plant LysM receptor polypeptide has enhanced affinity, selectivity, and/or specificity for one or more Nod factors as compared to a second unmodified plant LysM receptor polypeptide. An additional embodiment of this aspect includes the hydrophobic patch being within 30 Å, 20 Å, 10 Å, 7.5 Å, 5 Å, 4 Å, 3 Å, 2 Å, 1.5 Å, or 1 Å of a chitin binding motif. In a further embodiment of this aspect, which may be combined with any of the preceding embodiments, the LysM2 domain includes SEQ ID NO: 278, SEQ ID NO: 279, SEQ ID NO: 280, SEQ ID NO: 281, SEQ ID NO: 282, SEQ ID NO: 283, SEQ ID NO: 284, SEQ ID NO: 285, SEQ ID NO: 286, SEQ ID NO: 287, SEQ ID NO: 288, SEQ ID NO: 289, SEQ ID NO: 290, SEQ ID NO: 291, SEQ ID NO: 292, SEQ ID NO: 293, SEQ ID NO: 294, SEQ ID NO: 295, SEQ ID NO: 296, SEQ ID NO: 297, SEQ ID NO: 298, SEQ ID NO: 299, or SEQ ID NO: 300. In yet another embodiment of this aspect, which may be combined with any one of the preceding embodiments, the hydrophobic patch was generated by deleting at least one non-hydrophobic amino acid residue, substituting at least one amino acid residue with a more hydrophobic amino acid, or combinations thereof. Still another embodiment of this aspect, which may be combined with any one of the preceding embodiments, includes the at least one amino acid being identified by an amino acid sequence alignment with a LysM2 domain from a LysM high affinity Nod factor receptor that naturally has a hydrophobic patch that interacts with a Nod factor. In an additional embodiment of this aspect, the LysM2 domain from a LysM high affinity Nod factor receptor includes SEQ ID NO: 271, SEQ ID NO: 272, SEQ ID NO: 273, SEQ ID NO: 274, SEQ ID NO: 275, SEQ ID NO: 276, or SEQ ID NO: 277. In a further embodiment of this aspect, which may be combined with any preceding embodiment that has a LysM2 domain from a LysM high affinity Nod factor receptor, the at least one amino acid corresponds to the hydrophobic patch residues from SEQ ID NO: 223, SEQ ID NO: 249, SEQ ID NO: 250, SEQ ID NO: 251, SEQ ID NO: 254, SEQ ID NO: 257, or SEQ ID NO: 258. Yet another embodiment of this aspect, which may be combined with any preceding embodiment where the hydrophobic patch was generated by deleting at least one non-hydrophobic amino acid residue, includes the at least one amino acid being identified by structural modeling to identify a region in LysM2 where the hydrophobic patch can be engineered. A further embodiment of this aspect includes the structural modeling using the unmodified plant LysM amino acid sequence and a LysM domain three dimensional structure that has a known hydrophobic patch. An additional embodiment of this aspect includes the LysM domain three dimensional structure being a Medicago truncatula NFP ectodomain. Still another embodiment of this aspect, which may be combined with any preceding embodiment that has a LysM domain three dimensional structure that has a known hydrophobic patch, includes the known hydrophobic patch amino acid residues of the LysM domain three dimensional structure being or correspond to L147, L151, L152, L154, T156, K157 and V158 of the Medicago truncatula NFP ectodomain. A further embodiment of this aspect includes the alpha carbon of at least one amino acid being within 3 Å of an alpha carbon of a known hydrophobic patch amino acid residue in the structural alignment. Yet another embodiment of this aspect, which may be combined with any preceding embodiment that has structural modeling, includes the structural modeling being performed using SWISS-MODEL, PDB2PQR, APBS, PyMol, and APBS tools 2.1. Still another embodiment of this aspect, which may be combined with any of the preceding embodiments, includes the modified receptor polypeptide binding one or more Nod factors produced by nitrogen-fixing bacteria or by mycorrhizal fungi. A further embodiment of this aspect includes the one or more Nod factors being produced by nitrogen-fixing bacteria selected from the group of Mesorhizobium loti, Mesorhizobium huakuii, Mesorhizobium mediterraneum, Mesorhizobium ciceri, Mesorhizobium spp., Rhizobium mongolense, Rhizobium tropici, Rhizobium etli phaseoli, Rhizobium giardinii, Rhizobium leguminosarum optionally R. leguminosarum trifolii, R. leguminosarum viciae, and R. leguminosarum phaseoli, Burkholderiales optionally symbionts of Mimosa, Sinorhizobium meliloti, Sinorhizobium medicae, Sinorhizobium fredii, Sinorhizobium NGR234, Azorhizobium caulinodans, Bradyrhizobium japonicum, Bradyrhizobium elkanii, Bradyrhizobium liaonginense, Frankia spp., or any combination thereof, or by mycorrhizal fungi selected from the group of Acaulosporaceae spp., Diversisporaceae spp., Gigasporaceae spp., Pacisporaceae spp., Funneliformis spp., Glomus spp., Rhizophagus spp., Sclerocystis spp., Septoglomus spp., Claroideoglomus spp., Ambispora spp., Archaeospora spp., Geosiphon pyriformis, Paraglomus spp., other species in the division Glomeromycota, or any combination thereof. An additional embodiment of this aspect, which may be combined with any preceding embodiment that has one or more Nod factors produced by nitrogen-fixing bacteria or by mycorrhizal fungi, includes the second modified receptor polypeptide binding one or more Nod factors with higher affinity than a second unmodified receptor polypeptide. In yet another embodiment of this aspect, which may be combined with any preceding embodiment that has one or more Nod factors produced by nitrogen-fixing bacteria or by mycorrhizal fungi, the second modified receptor polypeptide binds one or more Nod factors with higher selectivity than a second unmodified receptor polypeptide. In still another embodiment of this aspect, which may be combined with any preceding embodiment that has one or more Nod factors produced by nitrogen-fixing bacteria or by mycorrhizal fungi, the second modified receptor polypeptide binds one or more Nod factors with altered specificity as compared to a second unmodified receptor polypeptide. Still another embodiment of this aspect, which may be combined with any one of the preceding embodiments, includes the modified LysM receptor polypeptides being localized to a plant cell plasma membrane. Yet another embodiment of this aspect includes the plant cell being a root cell. An additional embodiment of this aspect includes the root cell being a root epidermal cell. A further embodiment of this aspect, which may be combined with any of the preceding embodiments, includes the modified LysM receptor polypeptides being expressed in a developing plant root system. An additional embodiment of this aspect, which may be combined with any of the preceding embodiments, includes a first nucleic acid sequence encoding the first modified plant LysM receptor polypeptide and a second nucleic acid sequence encoding the second modified plant LysM receptor polypeptide, wherein the first nucleic acid sequence is operably linked to a first promoter, and wherein the second nucleic acid sequence is operably linked to a second promoter. Still another embodiment of this aspect includes the first and second promoters being root specific promoters, constitutive promoters, or a combination thereof. In yet another embodiment of this aspect, which may be combined with any preceding embodiment that has a promoter, the first and/or second promoters are selected from the group of a NFR1 promoter, a NFR5/NFP promoter, a LYK3 promoter, a CERK6 promoter, a NFR5/NFP promoter, a Lotus japonicus NFR5 promoter (SEQ ID NO: 261), a Lotus japonicus NFR1 promoter (SEQ ID NO: 261), a Lotus japonicus CERK6 promoter (SEQ ID NO: 264), a Medicago truncatula NFP promoter (SEQ ID NO: 263), a Medicago truncatula LYK3 promoter (SEQ ID NO: 262), a maize allothioneine promoter, a chitinase promoter, a maize ZRP2 promoter, a tomato LeExtl promoter, a glutamine synthetase soybean root promoter, a RCC3 promoter, a rice antiquitine promoter, a LRR receptor kinase promoter, or an Arabidopsis pCO2 promoter. In an additional embodiment of this aspect, which may be combined with any preceding embodiment that has a promoter, the first and/or second promoters are selected from the group of a CaMV35S promoter, a derivative of the CaMV35S promoter, a maize ubiquitin promoter, a trefoil promoter, a vein mosaic cassava virus promoter, or an Arabidopsis UBQ10 promoter.

[0017] In an additional embodiment of this aspect, which may be combined with any of the preceding embodiments, the plant is selected from the group of cassava, corn, cowpea, rice, barley, wheat, Trema spp., apple, pear, plum, apricot, peach, almond, walnut, strawberry, raspberry, blackberry, red currant, black currant, melon, cucumber, pumpkin, squash, grape, bean, soybean, pea, chickpea, cowpea, pigeon pea, lentil, Bambara groundnut, lupin, pulses, Medicago spp., Lotus spp., forage legumes, indigo, legume trees, or hemp. In a further embodiment of this aspect, which may be combined with any of the preceding embodiments, the plant part is a leaf, a stem, a root, a root primordia, a flower, a seed, a fruit, a kernel, a grain, a cell, or a portion thereof. An additional embodiment of this aspect includes the plant part being a fruit, a kernel, or a grain.

[0018] In some aspects, the present disclosure relates to a pollen grain or an ovule of the genetically altered plant of any of the above embodiments.

[0019] In some aspects, the present disclosure relates to a protoplast produced from the plant of any of the above embodiments.

[0020] In some aspects, the present disclosure relates to a tissue culture produced from protoplasts or cells from the plant of any of the above embodiments, wherein the cells or protoplasts are produced from a plant part selected from the group of leaf, anther, pistil, stem, petiole, root, root primordia, root tip, fruit, seed, flower, cotyledon, hypocotyl, embryo, or meristematic cell.

[0021] A further aspect of the present disclosure relates to methods of producing the genetically altered plant of the preceding embodiments including the modified LysM receptor polypeptide, including introducing a genetic alteration to the plant including a nucleic acid sequence encoding the modified LysM receptor polypeptide. An additional embodiment of this aspect includes the nucleic acid sequence being operably linked to a promoter. Yet another embodiment of this aspect includes the promoter being a root specific promoter, a constitutive promoters, or a combination thereof. Still another embodiment of this aspect, which may be combined with any preceding embodiment that has a promoter, includes the promoter being selected from the group of a NFR1 promoter, a NFR5/NFP promoter, a LYK3 promoter, a CERK6 promoter, a NFR5/NFP promoter, a Lotus japonicus NFR5 promoter (SEQ ID NO: 261), a Lotus japonicus NFR1 promoter (SEQ ID NO: 261), a Lotus japonicus CERK6 promoter (SEQ ID NO: 264), a Medicago truncatula NFP promoter (SEQ ID NO: 263), a Medicago truncatula LYK3 promoter (SEQ ID NO: 262), a maize allothioneine promoter, a chitinase promoter, a maize ZRP2 promoter, a tomato LeExtl promoter, a glutamine synthetase soybean root promoter, a RCC3 promoter, a rice antiquitine promoter, a LRR receptor kinase promoter, or an Arabidopsis pCO2 promoter. Still another embodiment of this aspect, which may be combined with any preceding embodiment that has a promoter, includes the promoter is selected from the group of a CaMV35S promoter, a derivative of the CaMV35S promoter, a maize ubiquitin promoter, a trefoil promoter, a vein mosaic cassava virus promoter, or an Arabidopsis UBQ10 promoter. An additional embodiment of this aspect, which may be combined with any of the preceding embodiments, includes the nucleic acid sequence being inserted into the genome of the plant so that the nucleic acid sequence is operably linked to an endogenous promoter. A further embodiment of this aspect includes the endogenous promoter being a root specific promoter.

[0022] A further aspect of the present disclosure relates to methods of producing the genetically altered plant of the preceding embodiments including a first modified LysM receptor polypeptide and a second LysM receptor polypeptide, including introducing a genetic alteration to the plant including a first nucleic acid sequence encoding the first modified LysM receptor polypeptide and introducing a genetic alteration to the plant including a second nucleic acid sequence encoding the second modified LysM receptor polypeptide. An additional embodiment of this aspect includes the first nucleic acid sequence being operably linked to a first promoter, and the second nucleic acid sequence being operably linked to a second promoter. Yet another embodiment of this aspect includes the first and second promoters being root specific promoters, constitutive promoters, or a combination thereof. Still another embodiment of this aspect, which may be combined with any preceding embodiment that has a promoter, includes the first and/or second promoters are selected from the group of a NFR1 promoter, a NFR5/NFP promoter, a LYK3 promoter, a CERK6 promoter, a NFR5/NFP promoter, a Lotus japonicus NFR5 promoter (SEQ ID NO: 261), a Lotus japonicus NFR1 promoter (SEQ ID NO: 261), a Lotus japonicus CERK6 promoter (SEQ ID NO: 264), a Medicago truncatula NFP promoter (SEQ ID NO: 263), a Medicago truncatula LYK3 promoter (SEQ ID NO: 262), a maize allothioneine promoter, a chitinase promoter, a maize ZRP2 promoter, a tomato LeExtl promoter, a glutamine synthetase soybean root promoter, a RCC3 promoter, a rice antiquitine promoter, a LRR receptor kinase promoter, or an Arabidopsis pCO2 promoter. An additional embodiment of this aspect, which may be combined with any preceding embodiment that has a promoter, includes the first and/or second promoters are selected from the group of a CaMV35S promoter, a derivative of the CaMV35S promoter, a maize ubiquitin promoter, a trefoil promoter, a vein mosaic cassava virus promoter, or an Arabidopsis UBQ10 promoter. Yet another embodiment of this aspect, which may be combined with any of the preceding embodiments, includes the first nucleic acid sequence being inserted into the genome of the plant so that the first nucleic acid sequence is operably linked to a first endogenous promoter, and/or the second nucleic acid sequence being inserted into the genome of the plant so that the second nucleic acid sequence is operably linked to a second endogenous promoter. A further embodiment of this aspect includes the first and second endogenous promoters being root specific promoters.

[0023] A further aspect of the present disclosure relates to methods of producing the genetically altered plant of any one of the preceding embodiments, including genetically editing a gene encoding an endogenous LysM receptor polypeptide in the plant to include the modified LysM1 domain. An additional embodiment of this aspect includes the endogenous LysM receptor polypeptide being an endogenous chitin LysM receptor polypeptide or an endogenous Nod factor LysM receptor polypeptide. Yet another embodiment of this aspect, which may be combined with any one of the preceding embodiments, includes the modified LysM receptor polypeptide being generated by: (a) providing a heterologous Nod factor LysM receptor polypeptide model including a structural model, a molecular model, a surface characteristics model, and/or an electrostatic potential model of a LysM1 domain, a LysM2 domain, a LysM3 domain, any combination thereof, or the ectodomain of the heterologous Nod factor LysM receptor polypeptide having selectivity for a beneficial nitrogen-fixing bacteria or a beneficial mycorrhizal fungus and an unmodified endogenous LysM receptor polypeptide; (b) identifying a first motif, a second motif, and/or optionally a fifth motif for modification in the unmodified endogenous LysM receptor polypeptide by comparing a LysM1 domain of the unmodified endogenous LysM receptor polypeptide with the corresponding LysM1 domain of the heterologous Nod factor LysM receptor polypeptide model; (c) modifying the first motif by substituting at least one, at least two, or at least three amino acid residues in the first motif with corresponding amino acid residues that are different in a third motif, modifying the second motif by substituting at least one, at least two, or at least three amino acid residues in the second motif with corresponding amino acid residues that are different in a fourth motif, and/or optionally modifying the fifth motif by substituting at least one, at least two, or at least three amino acid residues in the fifth motif with corresponding amino acid residues that are different in a sixth motif, wherein the third motif, the fourth motif, and the sixth motif have different affinities, selectivities, and/or specificities for oligosaccharides than the first motif, the second motif, and the fifth motif; and (d) generating the modified endogenous LysM receptor polypeptide wherein the first motif, the second motif, and/or optionally the fifth motif have been substituted with corresponding amino acid residues from the third motif, the fourth motif, and/or optionally the sixth motif.

[0024] Still another aspect of the present disclosure relates to methods of cultivating the genetically altered plant of any one of the preceding embodiments, including the steps of: (a) planting a genetically altered seedling, a genetically altered plantlet, a genetically altered cutting, a genetically altered tuber, a genetically altered root, or a genetically altered seed in soil to produce the genetically altered plant or grafting the genetically altered seedling, the genetically altered plantlet, or the genetically altered cutting to a root stock or a second plant grown in soil to produce the genetically altered plant; (b) cultivating the plant to produce harvestable seed, harvestable leaves, harvestable roots, harvestable cuttings, harvestable wood, harvestable fruit, harvestable kernels, harvestable tubers, and/or harvestable grain; and (c) harvesting the harvestable seed, harvestable leaves, harvestable roots, harvestable cuttings, harvestable wood, harvestable fruit, harvestable kernels, harvestable tubers, and/or harvestable grain.

### ENUMERATED EMBODIMENTS

[0025] 1. A modified plant LysM receptor polypeptide comprising a LysM1 domain comprising a first motif and a second motif, wherein the first motif and/or the second motif are modified as compared to the amino acid sequences of the corresponding wild-type plant LysM receptor polypeptide.
2. The receptor polypeptide of embodiment 1, wherein the first motif corresponds to amino acids 42-48 of SEQ ID NO: 162 when the receptor polypeptide amino acid sequence is aligned to SEQ ID NO: 162 and the second motif corresponds to amino acids 75-80 of SEQ ID NO: 162 when the receptor polypeptide amino acid sequence is aligned to SEQ ID NO: 162.
3. The receptor polypeptide of embodiment 1, wherein the first motif corresponds to amino acids 44-49 of SEQ ID NO: 164 when the receptor polypeptide amino acid sequence is aligned to SEQ ID NO: 164 and the second motif corresponds to amino acids 76-81 of SEQ ID NO: 164 when the receptor polypeptide amino acid sequence is aligned to SEQ ID NO: 164.
4. The receptor polypeptide of any one of embodiments 1-3, wherein the first motif is modified by substituting at least one, at least two, or at least three amino acid residues in the first motif with corresponding amino acid residues that are different in a third motif, and/or wherein the second motif is modified by substituting at least one, at least two, or at least three amino acid residues in the second motif with corresponding amino acid residues that are different in a fourth motif.
5. The receptor polypeptide of any one of embodiments 1-3, wherein the first motif is modified by substituting the first motif with a third motif, and/or wherein the second motif is modified by substituting the second motif with a fourth motif.
6. The receptor polypeptide of embodiment 4 or embodiment 5, wherein the third motif and the fourth motif have different affinities, selectivities, and/or specificities for oligosaccharides than the first motif and the second motif.
7. The receptor polypeptide of embodiment 6, wherein the third motif and the fourth motif have different affinities for oligosaccharides than the first motif and the second motif.
8. The receptor polypeptide of embodiment 6, wherein the third motif and the fourth motif have different selectivities for oligosaccharides than the first motif and the second motif.
9. The receptor polypeptide of embodiment 6, wherein the third motif and the fourth motif have different specificities for oligosaccharides than the first motif and the second motif.
10. The receptor polypeptide of any one of embodiments 4-9, wherein the third motif and the fourth motif are from a second plant LysM receptor polypeptide having the different affinity, selectivity and/or specificity for oligosaccharides and the third motif corresponds to amino acids 42-48 of SEQ ID NO: 162 when the second plant LysM polypeptide amino acid sequence is aligned to SEQ ID NO: 162 and the fourth motif corresponds to amino acids 75-80 of SEQ ID NO: 162 when the second plant LysM polypeptide amino acid sequence is aligned to SEQ ID NO: 162.
11. The receptor polypeptide of any one of embodiments 4-9, wherein the third motif and the fourth motif are from a second plant LysM receptor polypeptide having the different affinity, selectivity and/or specificity for oligosaccharides and the third motif corresponds to amino acids 44-49 of SEQ ID NO: 164 when the second plant LysM polypeptide amino acid sequence is aligned to SEQ ID NO: 164 and the fourth motif corresponds to amino acids 76-81 of SEQ ID NO: 164 when the second plant LysM polypeptide amino acid sequence is aligned to SEQ ID NO: 164.
12. The receptor polypeptide of embodiment 10 or embodiment 11, wherein at least one amino acid residue in flanking regions of the receptor polypeptide is different than the corresponding amino acid in the flanking regions of the second plant LysM receptor polypeptide and the flanking regions correspond to amino acids 41, 49-52, 73-74, and 81 of SEQ ID NO: 162, amino acids 47-53, 66-74, and 81-82 of SEQ ID NO: 163, and/or amino acids 43, 50-53, 74-75, and 82 of SEQ ID NO: 164.
13. The receptor polypeptide of any one of embodiments 1-12, wherein the first motif comprises SEQ ID NO: 1, SEQ ID NO: 2, SEQ ID NO: 3, SEQ ID NO: 4, SEQ ID NO: 5, SEQ ID NO: 6, SEQ ID NO: 7, SEQ ID NO: 8, SEQ ID NO: 9, SEQ ID NO: 10, SEQ ID NO: 11, SEQ ID NO: 12, SEQ ID NO: 13, SEQ ID NO: 14, SEQ ID NO: 15, SEQ ID NO: 16, SEQ ID NO: 17, SEQ ID NO: 18, SEQ ID NO: 19, SEQ ID NO: 20, SEQ ID NO: 21, SEQ ID NO: 22, SEQ ID NO: 23, SEQ ID NO: 24, SEQ ID NO: 25, SEQ ID NO: 26, SEQ ID NO: 53, SEQ ID NO: 54, SEQ ID NO: 55, SEQ ID NO: 59, SEQ ID NO: 60, SEQ ID NO: 61, SEQ ID NO: 62, SEQ ID NO: 63, SEQ ID NO: 64, SEQ ID NO: 65, SEQ ID NO: 66, SEQ ID NO: 67, SEQ ID NO: 68, SEQ ID NO: 79, SEQ ID NO: 80, SEQ ID NO: 81, SEQ ID NO: 82, SEQ ID NO: 83, SEQ ID NO: 84, SEQ ID NO: 85, SEQ ID NO: 86, SEQ ID NO: 87, SEQ ID NO: 88, SEQ ID NO: 89, SEQ ID NO: 90, SEQ ID NO: 91, SEQ ID NO: 92, SEQ ID NO: 93, SEQ ID NO: 94, SEQ ID NO: 95, SEQ ID NO: 96, SEQ ID NO: 97, SEQ ID NO: 98, SEQ ID NO: 99, SEQ ID NO: 143, or SEQ ID NO: 341.
14. The receptor polypeptide of any one of embodiments 1-13, wherein the second motif comprises SEQ ID NO: 27, SEQ ID NO: 28, SEQ ID NO: 29, SEQ ID NO: 30, SEQ ID NO: 31, SEQ ID NO: 32, SEQ ID NO: 33, SEQ ID NO: 34, SEQ ID NO: 35, SEQ ID NO: 36, SEQ ID NO: 37, SEQ ID NO: 38, SEQ ID NO: 39, SEQ ID NO: 40, SEQ ID NO: 41, SEQ ID NO: 42, SEQ ID NO: 43, SEQ ID NO: 44, SEQ ID NO: 45, SEQ ID NO: 46, SEQ ID NO: 47, SEQ ID NO: 48, SEQ ID NO: 49, SEQ ID NO: 50, SEQ ID NO: 51, SEQ ID NO: 52, SEQ ID NO: 56, SEQ ID NO: 57, SEQ ID NO: 58, SEQ ID NO: 69, SEQ ID NO: 70, SEQ ID NO: 71, SEQ ID NO: 72, SEQ ID NO: 73, SEQ ID NO: 74, SEQ ID NO: 75, SEQ ID NO: 76, SEQ ID NO: 77, SEQ ID NO: 78, SEQ ID NO: 121, SEQ ID NO: 122, SEQ ID NO: 123, SEQ ID NO: 124, SEQ ID NO: 125, SEQ ID NO: 126, SEQ ID NO: 127, SEQ ID NO: 128, SEQ ID NO: 129, SEQ ID NO: 130, SEQ ID NO: 131, SEQ ID NO: 132, SEQ ID NO: 133, SEQ ID NO: 134, SEQ ID NO: 135, SEQ ID NO: 136, SEQ ID NO: 137, SEQ ID NO: 138, SEQ ID NO: 139, SEQ ID NO: 140, SEQ ID NO: 141, or SEQ ID NO: 142.
15. The receptor polypeptide of any one of embodiments 4-14, wherein the third motif comprises SEQ ID NO: 1, SEQ ID NO: 2, SEQ ID NO: 3, SEQ ID NO: 4, SEQ ID NO: 5, SEQ ID NO: 6, SEQ ID NO: 7, SEQ ID NO: 8, SEQ ID NO: 9, SEQ ID NO: 10, SEQ ID NO: 11, SEQ ID NO: 12, SEQ ID NO: 13, SEQ ID NO: 14, SEQ ID NO: 15, SEQ ID NO: 16, SEQ ID NO: 17, SEQ ID NO: 18, SEQ ID NO: 19, SEQ ID NO: 20, SEQ ID NO: 21, SEQ ID NO: 22, SEQ ID NO: 23, SEQ ID NO: 24, SEQ ID NO: 25, SEQ ID NO: 26, SEQ ID NO: 53, SEQ ID NO: 54, SEQ ID NO: 55, SEQ ID NO: 59, SEQ ID NO: 60, SEQ ID NO: 61, SEQ ID NO: 62, SEQ ID NO: 63, SEQ ID NO: 64, SEQ ID NO: 65, SEQ ID NO: 66, SEQ ID NO: 67, SEQ ID NO: 68, SEQ ID NO: 79, SEQ ID NO: 80, SEQ ID NO: 81, SEQ ID NO: 82, SEQ ID NO: 83, SEQ ID NO: 84, SEQ ID NO: 85, SEQ ID NO: 86, SEQ ID NO: 87, SEQ ID NO: 88, SEQ ID NO: 89, SEQ ID NO: 90, SEQ ID NO: 91, SEQ ID NO: 92, SEQ ID NO: 93, SEQ ID NO: 94, SEQ ID NO: 95, SEQ ID NO: 96, SEQ ID NO: 97, SEQ ID NO: 98, SEQ ID NO: 99, SEQ ID NO: 143, or SEQ ID NO: 341, and wherein the first motif and the third motif are different.
16. The receptor polypeptide of any one of embodiments 4-15, wherein the fourth motif comprises SEQ ID NO: 27, SEQ ID NO: 28, SEQ ID NO: 29, SEQ ID NO: 30, SEQ ID NO: 31, SEQ ID NO: 32, SEQ ID NO: 33, SEQ ID NO: 34, SEQ ID NO: 35, SEQ ID NO: 36, SEQ ID NO: 37, SEQ ID NO: 38, SEQ ID NO: 39, SEQ ID NO: 40, SEQ ID NO: 41, SEQ ID NO: 42, SEQ ID NO: 43, SEQ ID NO: 44, SEQ ID NO: 45, SEQ ID NO: 46, SEQ ID NO: 47, SEQ ID NO: 48, SEQ ID NO: 49, SEQ ID NO: 50, SEQ ID NO: 51, SEQ ID NO: 52, SEQ ID NO: 56, SEQ ID NO: 57, SEQ ID NO: 58, SEQ ID NO: 69, SEQ ID NO: 70, SEQ ID NO: 71, SEQ ID NO: 72, SEQ ID NO: 73, SEQ ID NO: 74, SEQ ID NO: 75, SEQ ID NO: 76, SEQ ID NO: 77, SEQ ID NO: 78, SEQ ID NO: 121, SEQ ID NO: 122, SEQ ID NO: 123, SEQ ID NO: 124, SEQ ID NO: 125, SEQ ID NO: 126, SEQ ID NO: 127, SEQ ID NO: 128, SEQ ID NO: 129, SEQ ID NO: 130, SEQ ID NO: 131, SEQ ID NO: 132, SEQ ID NO: 133, SEQ ID NO: 134, SEQ ID NO: 135, SEQ ID NO: 136, SEQ ID NO: 137, SEQ ID NO: 138, SEQ ID NO: 139, SEQ ID NO: 140, SEQ ID NO: 141, or SEQ ID NO: 142, and wherein the second motif and the fourth motif are different.
17. The receptor polypeptide of any one of embodiments 1-16, further comprising a fifth motif in the LysM1 domain, wherein the fifth motif is modified.
18. The receptor polypeptide of embodiment 17, wherein the fifth motif corresponds to amino acids 56-65 of SEQ ID NO: 162 when the receptor polypeptide amino acid sequence is aligned to SEQ ID NO: 162.
19. The receptor polypeptide of embodiment 17 or embodiment 18, wherein the fifth motif is modified by substituting at least one, at least two, or at least three amino acid residues in the fifth motif with corresponding amino acid residues that are different in a sixth motif.
20. The receptor polypeptide of any one of embodiments 17-19, wherein the fifth motif is substituted with a sixth motif.
21. The receptor polypeptide of embodiment 19 or embodiment 20, wherein the sixth motif has a different specificity for oligosaccharides than the fifth motif.
22. The receptor polypeptide of any one of embodiments 20-21, wherein the sixth motif is from a second plant LysM receptor polypeptide having the different specificity for oligosaccharides and the sixth motif corresponds to amino acids 56-65 of SEQ ID NO: 162 when the second plant LysM polypeptide amino acid sequence is aligned to SEQ ID NO: 162.
23. The receptor polypeptide of any one of embodiments 17-22, wherein the fifth motif comprises SEQ ID NO: 100, SEQ ID NO: 101, SEQ ID NO: 102, SEQ ID NO: 103, SEQ ID NO: 104, SEQ ID NO: 105, SEQ ID NO: 106, SEQ ID NO: 107, SEQ ID NO: 108, SEQ ID NO: 109, SEQ ID NO: 110, SEQ ID NO: 111, SEQ ID NO: 112, SEQ ID NO: 113, SEQ ID NO: 114, SEQ ID NO: 115, SEQ ID NO: 116, SEQ ID NO: 117, SEQ ID NO: 118, SEQ ID NO: 119, or SEQ ID NO: 120.
24. The receptor polypeptide of any one of embodiments 19-23, wherein the sixth motif comprises SEQ ID NO: 100, SEQ ID NO: 101, SEQ ID NO: 102, SEQ ID NO: 103, SEQ ID NO: 104, SEQ ID NO: 105, SEQ ID NO: 106, SEQ ID NO: 107, SEQ ID NO: 108, SEQ ID NO: 109, SEQ ID NO: 110, SEQ ID NO: 111, SEQ ID NO: 112, SEQ ID NO: 113, SEQ ID NO: 114, SEQ ID NO: 115, SEQ ID NO: 116, SEQ ID NO: 117, SEQ ID NO: 118, SEQ ID NO: 119, or SEQ ID NO: 120, and wherein the fifth motif and the sixth motif are different.
25. The receptor polypeptide of any one of embodiments 1-24, wherein the modified receptor polypeptide binds one or more Nod factors produced by nitrogen-fixing bacteria or by mycorrhizal fungi.
26. The receptor of embodiment 25, wherein the one or more Nod factors are produced by nitrogen-fixing bacteria selected from the group consisting of Mesorhizobium loti, Mesorhizobium huakuii, Mesorhizobium mediterraneum, Mesorhizobium ciceri, Mesorhizobium spp., Rhizobium mongolense, Rhizobium tropici, Rhizobium etli phaseoli, Rhizobium giardinii, Rhizobium leguminosarum optionally R. leguminosarum trifolii, R. leguminosarum viciae, and R. leguminosarum phaseoli, Burkholderiales optionally symbionts of Mimosa, Sinorhizobium meliloti, Sinorhizobium medicae, Sinorhizobium fredii, Sinorhizobium NGR234, Azorhizobium caulinodans, Bradyrhizobium japonicum, Bradyrhizobium elkanii, Bradyrhizobium liaonginense, Frankia spp., and any combination thereof, or by mycorrhizal fungi selected from the group consisting of Acaulosporaceae spp., Diversisporaceae spp., Gigasporaceae spp., Pacisporaceae spp., Funneliformis spp., Glomus spp., Rhizophagus spp., Sclerocystis spp., Septoglomus spp., Claroideoglomus spp., Ambispora spp., Archaeospora spp., Geosiphon pyriformis, Paraglomus spp., other species in the division Glomeromycota, and any combination thereof.
27. The receptor polypeptide of embodiment 25 or embodiment 26, wherein the modified receptor polypeptide binds one or more Nod factors with higher affinity than an unmodified receptor polypeptide.
28. The receptor polypeptide of any one of embodiments 25-27, wherein the modified receptor polypeptide binds one or more Nod factors with higher selectivity than an unmodified receptor polypeptide.
29. The receptor polypeptide of any one of embodiments 25-28, wherein the modified receptor polypeptide binds one or more Nod factors with altered specificity as compared to an unmodified receptor polypeptide.
30. The modified plant LysM receptor polypeptide of any one of embodiments 1-29, further comprising a LysM2 domain modified to comprise a hydrophobic patch on the surface of the LysM2 domain, wherein the modified plant LysM receptor polypeptide has enhanced affinity, selectivity, and/or specificity for one or more Nod factors as compared to the unmodified plant LysM receptor polypeptide.
31. The receptor polypeptide of embodiment 30, wherein the hydrophobic patch is within 30 Å, 20 Å, 10 Å, 7.5 Å, 5 Å, 4 Å, 3 Å, 2 Å, 1.5 Å, or 1 Å of a chitin binding motif.
32. The receptor polypeptide of embodiment 30 or embodiment 31, wherein the LysM2 domain comprises SEQ ID NO: 278, SEQ ID NO: 279, SEQ ID NO: 280, SEQ ID NO: 281, SEQ ID NO: 282, SEQ ID NO: 283, SEQ ID NO: 284, SEQ ID NO: 285, SEQ ID NO: 286, SEQ ID NO: 287, SEQ ID NO: 288, SEQ ID NO: 289, SEQ ID NO: 290, SEQ ID NO: 291, SEQ ID NO: 292, SEQ ID NO: 293, SEQ ID NO: 294, SEQ ID NO: 295, SEQ ID NO: 296, SEQ ID NO: 297, SEQ ID NO: 298, SEQ ID NO: 299, or SEQ ID NO: 300.
33. The receptor polypeptide of any one of embodiments 30-32, wherein the hydrophobic patch was generated by deleting at least one non-hydrophobic amino acid residue, substituting at least one amino acid residue with a more hydrophobic amino acid, or combinations thereof.
34. The receptor polypeptide of embodiment 33, wherein the at least one amino acid was identified by an amino acid sequence alignment with a LysM2 domain from a LysM high affinity Nod factor receptor that naturally has a hydrophobic patch that interacts with a Nod factor.
35. The receptor polypeptide of embodiment 34, wherein the LysM2 domain from a LysM high affinity Nod factor receptor comprises SEQ ID NO: 271, SEQ ID NO: 272, SEQ ID NO: 273, SEQ ID NO: 274, SEQ ID NO: 275, SEQ ID NO: 276, or SEQ ID NO: 277.
36. The receptor polypeptide of embodiment 34 or embodiment 35, wherein the at least one amino acid corresponds to the hydrophobic patch residues from SEQ ID NO: 223, SEQ ID NO: 249, SEQ ID NO: 250, SEQ ID NO: 251, SEQ ID NO: 254, SEQ ID NO: 257, or SEQ ID NO: 258.
37. The receptor polypeptide of any one of embodiments 33-36, wherein the at least one amino acid was identified by structural modeling to identify a region in LysM2 where the hydrophobic patch can be engineered.
38. The receptor polypeptide of embodiment 37, wherein the structural modeling used the unmodified plant LysM amino acid sequence and a LysM domain three dimensional structure that has a known hydrophobic patch.
39. The receptor polypeptide of embodiment 38, wherein the LysM domain three dimensional structure is a Medicago truncatula NFP ectodomain.
40. The receptor polypeptide of embodiment 38 or embodiment 39, wherein the known hydrophobic patch amino acid residues of the LysM domain three dimensional structure are or correspond to L147, L151, L152, L154, T156, K157 and V158 of the Medicago truncatula NFP ectodomain.
41. The receptor polypeptide of embodiment 40, wherein the alpha carbon of at least one amino acid was within 3 Å of an alpha carbon of a known hydrophobic patch amino acid residue in the structural alignment.
42. The receptor polypeptide of any one of embodiments 37-41, wherein the structural modeling was performed using SWISS-MODEL, PDB2PQR, APBS, PyMol, and APBS tools 2.1.
43. The receptor polypeptide of any one of embodiments 30-42, wherein the modified receptor polypeptide binds one or more Nod factors produced by nitrogen-fixing bacteria or by mycorrhizal fungi.
44. The receptor of embodiment 43, wherein the one or more Nod factors is produced by nitrogen-fixing bacteria selected from the group consisting of Mesorhizobium loti, Mesorhizobium huakuii, Mesorhizobium mediterraneum, Mesorhizobium ciceri, Mesorhizobium spp., Rhizobium mongolense, Rhizobium tropici, Rhizobium etli phaseoli, Rhizobium giardinii, Rhizobium leguminosarum optionally R. leguminosarum trifolii, R. leguminosarum viciae, and R. leguminosarum phaseoli, Burkholderiales optionally symbionts of Mimosa, Sinorhizobium meliloti, Sinorhizobium medicae, Sinorhizobium fredii, Sinorhizobium NGR234, Azorhizobium caulinodans, Bradyrhizobium japonicum, Bradyrhizobium elkanii, Bradyrhizobium liaonginense, Frankia spp., and any combination thereof, or by mycorrhizal fungi selected from the group consisting of Acaulosporaceae spp., Diversisporaceae spp., Gigasporaceae spp., Pacisporaceae spp., Funneliformis spp., Glomus spp., Rhizophagus spp., Sclerocystis spp., Septoglomus spp., Claroideoglomus spp., Ambispora spp., Archaeospora spp., Geosiphon pyriformis, Paraglomus spp., other species in the division Glomeromycota, and any combination thereof.
45. The receptor polypeptide of embodiment 43 or embodiment 44, wherein the modified receptor polypeptide binds the one or more Nod factors with higher affinity than an unmodified receptor polypeptide.
46. The receptor polypeptide of any one of embodiments 43-45, wherein the modified receptor polypeptide binds the one or more Nod factors with higher selectivity than an unmodified receptor polypeptide.
47. The receptor polypeptide of any one of embodiments 43-46, wherein the modified receptor polypeptide binds the one or more Nod factors with altered specificity as compared to an unmodified receptor polypeptide.
48. A genetically altered plant or part thereof comprising the modified LysM receptor polypeptide of any one of embodiments 1-47.
49. The genetically altered plant or part thereof of embodiment 48, wherein the modified LysM receptor polypeptide has higher affinity, higher selectivity, and/or altered specificity for one or more Nod factors than an unmodified LysM receptor polypeptide and the expression of the modified LysM receptor polypeptide allows the plant or part thereof to recognize one or more Nod factors with high affinity, high selectivity, and/or altered specificity.
50. The genetically altered plant or part thereof of embodiment 48 or embodiment 49, wherein the one or more Nod factors are produced by nitrogen-fixing bacteria or by mycorrhizal fungi.
51. The genetically altered plant or part thereof of embodiment 50, wherein the one or more Nod factors are produced by nitrogen-fixing bacteria selected from the group consisting of Mesorhizobium loti, Mesorhizobium huakuii, Mesorhizobium mediterraneum, Mesorhizobium ciceri, Mesorhizobium spp., Rhizobium mongolense, Rhizobium tropici, Rhizobium etli phaseoli, Rhizobium giardinii, Rhizobium leguminosarum optionally R. leguminosarum trifolii, R. leguminosarum viciae, and R. leguminosarum phaseoli, Burkholderiales optionally symbionts of Mimosa, Sinorhizobium meliloti, Sinorhizobium medicae, Sinorhizobium fredii, Sinorhizobium NGR234, Azorhizobium caulinodans, Bradyrhizobium japonicum, Bradyrhizobium elkanii, Bradyrhizobium liaonginense, Frankia spp., and any combination thereof, or by or by mycorrhizal fungi selected from the group consisting of Acaulosporaceae spp., Diversisporaceae spp., Gigasporaceae spp., Pacisporaceae spp., Funneliformis spp., Glomus spp., Rhizophagus spp., Sclerocystis spp., Septoglomus spp., Claroideoglomus spp., Ambispora spp., Archaeospora spp., Geosiphon pyriformis, Paraglomus spp., other species in the division Glomeromycota, and any combination thereof.
52. The genetically altered plant or part thereof of any one of embodiments 48-51, wherein the modified LysM receptor polypeptide is localized to a plant cell plasma membrane.
53. The genetically altered plant or part thereof of embodiment 52, wherein the plant cell is a root cell.
54. The genetically altered plant or part thereof of embodiment 53, wherein the root cell is a root epidermal cell.
55. The genetically altered plant or part thereof of any one of embodiments 48-54, wherein the modified LysM receptor polypeptide is expressed in a developing plant root system.
56. The genetically altered plant or part thereof of any one of embodiments 48-55, comprising a nucleic acid sequence encoding the modified LysM receptor polypeptide, wherein the nucleic acid sequence is operably linked to a promoter.
57. The genetically altered plant or part thereof of embodiment 56, wherein the promoter is a root specific promoter, a constitutive promoter, or a combination thereof.
58. The genetically altered plant or part thereof of embodiment 56 or embodiment 57, wherein the promoter is selected from the group consisting of a NFR1 promoter, a NFR5/NFP promoter, a LYK3 promoter, a CERK6 promoter, a NFR5/NFP promoter, a Lotus japonicus NFR5 promoter (SEQ ID NO: 261), a Lotus japonicus NFR1 promoter (SEQ ID NO: 261), a Lotus japonicus CERK6 promoter (SEQ ID NO: 264), a Medicago truncatula NFP promoter (SEQ ID NO: 263), a Medicago truncatula LYK3 promoter (SEQ ID NO: 262), a maize allothioneine promoter, a chitinase promoter, a maize ZRP2 promoter, a tomato LeExtl promoter, a glutamine synthetase soybean root promoter, a RCC3 promoter, a rice antiquitine promoter, a LRR receptor kinase promoter, and an Arabidopsis pCO2 promoter.
59. The genetically altered plant or part thereof of embodiment 56 or embodiment 57, wherein the promoter is selected from the group consisting of a CaMV35S promoter, a derivative of the CaMV35S promoter, a maize ubiquitin promoter, a trefoil promoter, a vein mosaic cassava virus promoter, and an Arabidopsis UBQ10 promoter.
60. A genetically altered plant or part thereof comprising a first modified LysM receptor polypeptide comprising the modified LysM receptor polypeptide of embodiments 1-29 and a second modified LysM receptor polypeptide comprising a LysM2 domain modified to comprise a hydrophobic patch on the surface of the LysM2 domain, wherein the second modified plant LysM receptor polypeptide has enhanced affinity, selectivity, and/or specificity for one or more Nod factors as compared to a second unmodified plant LysM receptor polypeptide.
61. The genetically altered plant or part thereof of embodiment 60, wherein the hydrophobic patch is within 30 Å, 20 Å, 10 Å, 7.5 Å, 5 Å, 4 Å, 3 Å, 2 Å, 1.5 Å, or 1 Å of a chitin binding motif.
62. The genetically altered plant or part thereof of embodiment 60 or embodiment 61, wherein the LysM2 domain comprises SEQ ID NO: 278, SEQ ID NO: 279, SEQ ID NO: 280, SEQ ID NO: 281, SEQ ID NO: 282, SEQ ID NO: 283, SEQ ID NO: 284, SEQ ID NO: 285, SEQ ID NO: 286, SEQ ID NO: 287, SEQ ID NO: 288, SEQ ID NO: 289, SEQ ID NO: 290, SEQ ID NO: 291, SEQ ID NO: 292, SEQ ID NO: 293, SEQ ID NO: 294, SEQ ID NO: 295, SEQ ID NO: 296, SEQ ID NO: 297, SEQ ID NO: 298, SEQ ID NO: 299, or SEQ ID NO: 300.
63. The genetically altered plant or part thereof of any one of embodiments 60-62, wherein the hydrophobic patch was generated by deleting at least one non-hydrophobic amino acid residue, substituting at least one amino acid residue with a more hydrophobic amino acid, or combinations thereof.
64. The genetically altered plant or part thereof of embodiment 63, wherein the at least one amino acid was identified by an amino acid sequence alignment with a LysM2 domain from a LysM high affinity Nod factor receptor that naturally has a hydrophobic patch that interacts with a Nod factor.
65. The genetically altered plant or part thereof of embodiment 64, wherein the LysM2 domain from a LysM high affinity Nod factor receptor comprises SEQ ID NO: 271, SEQ ID NO: 272, SEQ ID NO: 273, SEQ ID NO: 274, SEQ ID NO: 275, SEQ ID NO: 276, or SEQ ID NO: 277.
66. The genetically altered plant or part thereof of embodiment 64 or embodiment 65, wherein the at least one amino acid corresponds to the hydrophobic patch residues from SEQ ID NO: 223, SEQ ID NO: 249, SEQ ID NO: 250, SEQ ID NO: 251, SEQ ID NO: 254, SEQ ID NO: 257, or SEQ ID NO: 258.
67. The genetically altered plant or part thereof of embodiments 63-66, wherein the at least one amino acid was identified by structural modeling to identify a region in LysM2 where the hydrophobic patch can be engineered.
68. The genetically altered plant or part thereof of embodiment 67, wherein the structural modeling used the second unmodified plant LysM amino acid sequence and a LysM domain three dimensional structure that has a known hydrophobic patch.
69. The genetically altered plant or part thereof of embodiment 68, wherein the LysM domain three dimensional structure is a Medicago truncatula NFP ectodomain.
70. The genetically altered plant or part thereof of embodiment 68 or embodiment 69, wherein the known hydrophobic patch amino acid residues of the LysM domain three dimensional structure are or correspond to L147, L151, L152, L154, T156, K157 and V158 of the Medicago truncatula NFP ectodomain.
71. The genetically altered plant or part thereof of embodiment 70, wherein the alpha carbon of at least one amino acid was within 3 Å of an alpha carbon of a known hydrophobic patch amino acid residue in the structural alignment.
72. The genetically altered plant or part thereof of any one of embodiments 67-71, wherein the structural modeling was performed using SWISS-MODEL, PDB2PQR, APBS, PyMol, and APBS tools 2.1.
73. The genetically altered plant or part thereof of any one of embodiments 60-72, wherein the second modified receptor polypeptide binds one or more Nod factors produced by nitrogen-fixing bacteria or by mycorrhizal fungi.
74. The genetically altered plant or part thereof of embodiment 73, wherein the one or more Nod factors is produced by nitrogen-fixing bacteria selected from the group consisting of Mesorhizobium loti, Mesorhizobium huakuii, Mesorhizobium mediterraneum, Mesorhizobium ciceri, Mesorhizobium spp., Rhizobium mongolense, Rhizobium tropici, Rhizobium etli phaseoli, Rhizobium giardinii, Rhizobium leguminosarum optionally R. leguminosarum trifolii, R. leguminosarum viciae, and R. leguminosarum phaseoli, Burkholderiales optionally symbionts of Mimosa, Sinorhizobium meliloti, Sinorhizobium medicae, Sinorhizobium fredii, Sinorhizobium NGR234, Azorhizobium caulinodans, Bradyrhizobium japonicum, Bradyrhizobium elkanii, Bradyrhizobium liaonginense, Frankia spp., and any combination thereof, or by mycorrhizal fungi selected from the group consisting of Acaulosporaceae spp., Diversisporaceae spp., Gigasporaceae spp., Pacisporaceae spp., Funneliformis spp., Glomus spp., Rhizophagus spp., Sclerocystis spp., Septoglomus spp., Claroideoglomus spp., Ambispora spp., Archaeospora spp., Geosiphon pyriformis, Paraglomus spp., other species in the division Glomeromycota, and any combination thereof.
75. The genetically altered plant or part thereof of embodiment 73 or embodiment 74, wherein the second modified receptor polypeptide binds one or more Nod factors with higher affinity than a second unmodified receptor polypeptide.
76. The genetically altered plant or part thereof of any one of embodiments 73-75, wherein the second modified receptor polypeptide binds one or more Nod factors with higher selectivity than a second unmodified receptor polypeptide. 77. The genetically altered plant or part thereof of any one of embodiments 73-76, wherein the second modified receptor polypeptide binds one or more Nod factors with altered specificity as compared to the second unmodified receptor polypeptide.
78. The genetically altered plant or part thereof of any one of embodiments 60-77, wherein the modified LysM receptor polypeptides are localized to a plant cell plasma membrane.
79. The genetically altered plant or part thereof of embodiment 78, wherein the plant cell is a root cell.
80. The genetically altered plant or part thereof of embodiment 79, wherein the root cell is a root epidermal cell.
81. The genetically altered plant or part thereof of any one of embodiments 60-80, wherein the modified LysM receptor polypeptides are expressed in a developing plant root system.
82. The genetically altered plant or part thereof of any one of embodiments 60-81, comprising a first nucleic acid sequence encoding the first modified plant LysM receptor polypeptide and a second nucleic acid sequence encoding the second modified plant LysM receptor polypeptide, wherein the first nucleic acid sequence is operably linked to a first promoter, and wherein the second nucleic acid sequence is operably linked to a second promoter.
83. The genetically altered plant or part thereof of embodiment 82, wherein the first and second promoters are root specific promoters, constitutive promoters, or a combination thereof.
84. The genetically altered plant or part thereof of embodiment 82 or embodiment 83, wherein the first and/or second promoters are selected from the group consisting of a NFR1 promoter, a NFR5/NFP promoter, a LYK3 promoter, a CERK6 promoter, a NFR5/NFP promoter, a Lotus japonicus NFR5 promoter (SEQ ID NO: 261), a Lotus japonicus NFR1 promoter (SEQ ID NO: 261), a Lotus japonicus CERK6 promoter (SEQ ID NO: 264), a Medicago truncatula NFP promoter (SEQ ID NO: 263), a Medicago truncatula LYK3 promoter (SEQ ID NO: 262), a maize allothioneine promoter, a chitinase promoter, a maize ZRP2 promoter, a tomato LeExtl promoter, a glutamine synthetase soybean root promoter, a RCC3 promoter, a rice antiquitine promoter, a LRR receptor kinase promoter, and an Arabidopsis pCO2 promoter.
85. The genetically altered plant or part thereof of embodiment 83 or embodiment 84, wherein the first and/or second promoters are selected from the group consisting of a CaMV35S promoter, a derivative of the CaMV35S promoter, a maize ubiquitin promoter, a trefoil promoter, a vein mosaic cassava virus promoter, and an Arabidopsis UBQ10 promoter.
86. The genetically altered plant or part thereof of any one of embodiments 48-85, wherein the plant is selected from the group consisting of cassava, corn, cowpea, rice, barley, wheat, Trema spp., apple, pear, plum, apricot, peach, almond, walnut, strawberry, raspberry, blackberry, red currant, black currant, melon, cucumber, pumpkin, squash, grape, bean, soybean, pea, chickpea, cowpea, pigeon pea, lentil, Bambara groundnut, lupin, pulses, Medicago spp., Lotus spp., forage legumes, indigo, legume trees, and hemp.
87. The genetically altered plant part of the plant of any one of embodiments 48-85, wherein the plant part is a leaf, a stem, a root, a root primordia, a flower, a seed, a fruit, a kernel, a grain, a cell, or a portion thereof.
88. The genetically altered plant part of embodiment 87, wherein the part is a fruit, a kernel, or a grain.
89. A pollen grain or an ovule of the genetically altered plant of any one of embodiments 48-85.
90. A protoplast produced from the plant of any one of embodiments 48-85.
91. A tissue culture produced from protoplasts or cells from the plant of any one of embodiments 48-85, wherein the cells or protoplasts are produced from a plant part selected from the group consisting of leaf, anther, pistil, stem, petiole, root, root primordia, root tip, fruit, seed, flower, cotyledon, hypocotyl, embryo, and meristematic cell.
92. A method of producing the genetically altered plant of any one of embodiments 48-59 and 86-91, comprising introducing a genetic alteration to the plant comprising a nucleic acid sequence encoding the modified LysM receptor polypeptide.
93. The method of embodiment 92, wherein the nucleic acid sequence is operably linked to a promoter.
94. The method of embodiment 93, wherein the promoter is a root specific promoter, a constitutive promoters, or a combination thereof.
95. The method of embodiment 93 or embodiment 94, wherein the promoter is selected from the group consisting of a NFR1 promoter, a NFR5/NFP promoter, a LYK3 promoter, a CERK6 promoter, a NFR5/NFP promoter, a Lotus japonicus NFR5 promoter (SEQ ID NO: 261), a Lotus japonicus NFR1 promoter (SEQ ID NO: 261), a Lotus japonicus CERK6 promoter (SEQ ID NO: 264), a Medicago truncatula NFP promoter (SEQ ID NO: 263), a Medicago truncatula LYK3 promoter (SEQ ID NO: 262), a maize allothioneine promoter, a chitinase promoter, a maize ZRP2 promoter, a tomato LeExtl promoter, a glutamine synthetase soybean root promoter, a RCC3 promoter, a rice antiquitine promoter, a LRR receptor kinase promoter, and an Arabidopsis pCO2 promoter.
96. The method of embodiment 94 or embodiment 95, wherein the promoter is selected from the group consisting of a CaMV35S promoter, a derivative of the CaMV35S promoter, a maize ubiquitin promoter, a trefoil promoter, a vein mosaic cassava virus promoter, and an Arabidopsis UBQ10 promoter.
97. The method of any one of embodiments 92-96, wherein the nucleic acid sequence is inserted into the genome of the plant so that the nucleic acid sequence is operably linked to an endogenous promoter.
98. The method of embodiment 97, wherein the endogenous promoter is a root specific promoter.
99. A method of producing the genetically altered plant of any one of embodiments 60-91, comprising introducing a genetic alteration to the plant comprising a first nucleic acid sequence encoding the first modified LysM receptor polypeptide and introducing a genetic alteration to the plant comprising a second nucleic acid sequence encoding the second modified LysM receptor polypeptide.
100. The method of embodiment 99, wherein the first nucleic acid sequence is operably linked to a first promoter, and wherein the second nucleic acid sequence is operably linked to a second promoter.
101. The method of embodiment 100, wherein the first and second promoters are root specific promoters, constitutive promoters, or a combination thereof.
102. The method of embodiment 100 or embodiment 101, wherein the first and/or second promoters are selected from the group consisting of a NFR1 promoter, a NFR5/NFP promoter, a LYK3 promoter, a CERK6 promoter, a NFR5/NFP promoter, a Lotus japonicus NFR5 promoter (SEQ ID NO: 261), a Lotus japonicus NFR1 promoter (SEQ ID NO: 261), a Lotus japonicus CERK6 promoter (SEQ ID NO: 264), a Medicago truncatula NFP promoter (SEQ ID NO: 263), a Medicago truncatula LYK3 promoter (SEQ ID NO: 262), a maize allothioneine promoter, a chitinase promoter, a maize ZRP2 promoter, a tomato LeExtl promoter, a glutamine synthetase soybean root promoter, a RCC3 promoter, a rice antiquitine promoter, a LRR receptor kinase promoter, and an Arabidopsis pCO2 promoter.
103. The method of embodiment 100 or embodiment 101, wherein the first and/or second promoters are selected from the group consisting of a CaMV35S promoter, a derivative of the CaMV35S promoter, a maize ubiquitin promoter, a trefoil promoter, a vein mosaic cassava virus promoter, and an Arabidopsis UBQ10 promoter.
104. The method of any one of embodiments 99-103, wherein the first nucleic acid sequence is inserted into the genome of the plant so that the first nucleic acid sequence is operably linked to a first endogenous promoter, and/or wherein the second nucleic acid sequence is inserted into the genome of the plant so that the second nucleic acid sequence is operably linked to a second endogenous promoter.
105. The method of embodiment 104, wherein the first and second endogenous promoters are root specific promoters.
106. A method of producing the genetically altered plant of any one of embodiments 50-93, comprising genetically editing a gene encoding an endogenous LysM receptor polypeptide in the plant to comprise the modified LysM1 domain.
107. The method of embodiment 106, wherein the endogenous LysM receptor polypeptide is an endogenous chitin LysM receptor polypeptide or an endogenous Nod factor LysM receptor polypeptide.
108. The method of embodiment 106 or embodiment 107, wherein the modified LysM receptor polypeptide was generated by:
[0026] (a) providing a heterologous Nod factor LysM receptor polypeptide model comprising a structural model, a molecular model, a surface characteristics model, and/or an electrostatic potential model of a LysM1 domain, a LysM2 domain, a LysM3 domain, any combination thereof, or the ectodomain of the heterologous Nod factor LysM receptor polypeptide having selectivity for a beneficial nitrogen-fixing bacteria or a beneficial mycorrhizal fungus and an unmodified endogenous LysM receptor polypeptide;
[0027] (b) identifying a first motif, a second motif, and/or optionally a fifth motif for modification in the unmodified endogenous LysM receptor polypeptide by comparing a LysM1 domain of the unmodified endogenous LysM receptor polypeptide with the corresponding LysM1 domain of the heterologous Nod factor LysM receptor polypeptide model;
[0028] (c) modifying the first motif by substituting at least one, at least two, or at least three amino acid residues in the first motif with corresponding amino acid residues that are different in a third motif, modifying the second motif by substituting at least one, at least two, or at least three amino acid residues in the second motif with corresponding amino acid residues that are different in a fourth motif, and/or optionally modifying the fifth motif by substituting at least one, at least two, or at least three amino acid residues in the fifth motif with corresponding amino acid residues that are different in a sixth motif, wherein the third motif, the fourth motif, and the sixth motif have different affinities, selectivities, and/or specificities for oligosaccharides than the first motif, the second motif, and the fifth motif; and
[0029] (d) generating the modified endogenous LysM receptor polypeptide wherein the first motif, the second motif, and/or optionally the fifth motif have been substituted with corresponding amino acid residues from the third motif, the fourth motif, and/or optionally the sixth motif.
   109. A method of cultivating the genetically altered plant of any one of embodiments 48-91, comprising the steps of:
[0030] (a) planting a genetically altered seedling, a genetically altered plantlet, a genetically altered cutting, a genetically altered tuber, a genetically altered root, or a genetically altered seed in soil to produce the genetically altered plant or grafting the genetically altered seedling, the genetically altered plantlet, or the genetically altered cutting to a root stock or a second plant grown in soil to produce the genetically altered plant;
[0031] (b) cultivating the plant to produce harvestable seed, harvestable leaves, harvestable roots, harvestable cuttings, harvestable wood, harvestable fruit, harvestable kernels, harvestable tubers, and/or harvestable grain; and
[0032] (c) harvesting the harvestable seed, harvestable leaves, harvestable roots, harvestable cuttings, harvestable wood, harvestable fruit, harvestable kernels, harvestable tubers, and/or harvestable grain.
   110. An isolated DNA molecule encoding a modified plant LysM receptor polypeptide comprising a LysM1 domain comprising a first motif and a second motif, wherein the first motif and/or the second motif are modified as compared to the amino acid sequences of the corresponding wild-type plant LysM receptor polypeptide.
   111. The isolated DNA molecule of embodiment 110, wherein the first motif corresponds to amino acids 42-48 of SEQ ID NO: 162 when the receptor polypeptide amino acid sequence is aligned to SEQ ID NO: 162 and the second motif corresponds to amino acids 75-80 of SEQ ID NO: 162 when the receptor polypeptide amino acid sequence is aligned to SEQ ID NO: 162.
   112. The isolated DNA molecule of embodiment 110, wherein the first motif corresponds to amino acids 44-49 of SEQ ID NO: 164 when the receptor polypeptide amino acid sequence is aligned to SEQ ID NO: 164 and the second motif corresponds to amino acids 76-81 of SEQ ID NO: 164 when the receptor polypeptide amino acid sequence is aligned to SEQ ID NO: 164.
   113. The isolated DNA molecule of any one of embodiments 110-112, wherein the first motif is modified by substituting at least one, at least two, or at least three amino acid residues in the first motif with corresponding amino acid residues that are different in a third motif, and/or wherein the second motif is modified by substituting at least one, at least two, or at least three amino acid residues in the second motif with corresponding amino acid residues that are different in a fourth motif.
   114. The isolated DNA molecule of any one of embodiments 110-112, wherein the first motif is modified by substituting the first motif with a third motif, and/or wherein the second motif is modified by substituting the second motif with a fourth motif.
   115. The isolated DNA molecule of embodiment 113 or embodiment 114, wherein the third motif and the fourth motif have different affinities, selectivities, and/or specificities for oligosaccharides than the first motif and the second motif.
   116. The isolated DNA molecule of embodiment 115, wherein the third motif and the fourth motif have different affinities for oligosaccharides than the first motif and the second motif.
   117. The isolated DNA molecule of embodiment 115, wherein the third motif and the fourth motif have different selectivities for oligosaccharides than the first motif and the second motif.
   118. The isolated DNA molecule of embodiment 115, wherein the third motif and the fourth motif have different specificities for oligosaccharides than the first motif and the second motif.
   119. The isolated DNA molecule of any one of embodiments 113-118, wherein the third motif and the fourth motif are from a second plant LysM receptor polypeptide having the different affinity, selectivity and/or specificity for oligosaccharides and the third motif corresponds to amino acids 42-48 of SEQ ID NO: 162 when the second plant LysM polypeptide amino acid sequence is aligned to SEQ ID NO: 162 and the fourth motif corresponds to amino acids 75-80 of SEQ ID NO: 162 when the second plant LysM polypeptide amino acid sequence is aligned to SEQ ID NO: 162.
   120. The isolated DNA molecule of any one of embodiments 113-118, wherein the third motif and the fourth motif are from a second plant LysM receptor polypeptide having the different affinity, selectivity and/or specificity for oligosaccharides and the third motif corresponds to amino acids 44-49 of SEQ ID NO: 164 when the second plant LysM polypeptide amino acid sequence is aligned to SEQ ID NO: 164 and the fourth motif corresponds to amino acids 76-81 of SEQ ID NO: 164 when the second plant LysM polypeptide amino acid sequence is aligned to SEQ ID NO: 164.
   121. The isolated DNA molecule of embodiment 119 or embodiment 120, wherein at least one amino acid residue in flanking regions of the receptor polypeptide is different than the corresponding amino acid in the flanking regions of the second plant LysM receptor polypeptide and the flanking regions correspond to amino acids 41, 49-52, 73-74, and 81 of SEQ ID NO: 162, amino acids 47-53, 66-74, and 81-82 of SEQ ID NO: 163, and/or amino acids 43, 50-53, 74-75, and 82 of SEQ ID NO: 164.
   122. The isolated DNA molecule of any one of embodiments 110-121, wherein the first motif comprises SEQ ID NO: 1, SEQ ID NO: 2, SEQ ID NO: 3, SEQ ID NO: 4, SEQ ID NO: 5, SEQ ID NO: 6, SEQ ID NO: 7, SEQ ID NO: 8, SEQ ID NO: 9, SEQ ID NO: 10, SEQ ID NO: 11, SEQ ID NO: 12, SEQ ID NO: 13, SEQ ID NO: 14, SEQ ID NO: 15, SEQ ID NO: 16, SEQ ID NO: 17, SEQ ID NO: 18, SEQ ID NO: 19, SEQ ID NO: 20, SEQ ID NO: 21, SEQ ID NO: 22, SEQ ID NO: 23, SEQ ID NO: 24, SEQ ID NO: 25, SEQ ID NO: 26, SEQ ID NO: 53, SEQ ID NO: 54, SEQ ID NO: 55, SEQ ID NO: 59, SEQ ID NO: 60, SEQ ID NO: 61, SEQ ID NO: 62, SEQ ID NO: 63, SEQ ID NO: 64, SEQ ID NO: 65, SEQ ID NO: 66, SEQ ID NO: 67, SEQ ID NO: 68, SEQ ID NO: 79, SEQ ID NO: 80, SEQ ID NO: 81, SEQ ID NO: 82, SEQ ID NO: 83, SEQ ID NO: 84, SEQ ID NO: 85, SEQ ID NO: 86, SEQ ID NO: 87, SEQ ID NO: 88, SEQ ID NO: 89, SEQ ID NO: 90, SEQ ID NO: 91, SEQ ID NO: 92, SEQ ID NO: 93, SEQ ID NO: 94, SEQ ID NO: 95, SEQ ID NO: 96, SEQ ID NO: 97, SEQ ID NO: 98, SEQ ID NO: 99, SEQ ID NO: 143, or SEQ ID NO: 341.
   123. The isolated DNA molecule of any one of embodiments 110-122, wherein the second motif comprises SEQ ID NO: 27, SEQ ID NO: 28, SEQ ID NO: 29, SEQ ID NO: 30, SEQ ID NO: 31, SEQ ID NO: 32, SEQ ID NO: 33, SEQ ID NO: 34, SEQ ID NO: 35, SEQ ID NO: 36, SEQ ID NO: 37, SEQ ID NO: 38, SEQ ID NO: 39, SEQ ID NO: 40, SEQ ID NO: 41, SEQ ID NO: 42, SEQ ID NO: 43, SEQ ID NO: 44, SEQ ID NO: 45, SEQ ID NO: 46, SEQ ID NO: 47, SEQ ID NO: 48, SEQ ID NO: 49, SEQ ID NO: 50, SEQ ID NO: 51, SEQ ID NO: 52, SEQ ID NO: 56, SEQ ID NO: 57, SEQ ID NO: 58, SEQ ID NO: 69, SEQ ID NO: 70, SEQ ID NO: 71, SEQ ID NO: 72, SEQ ID NO: 73, SEQ ID NO: 74, SEQ ID NO: 75, SEQ ID NO: 76, SEQ ID NO: 77, SEQ ID NO: 78, SEQ ID NO: 121, SEQ ID NO: 122, SEQ ID NO: 123, SEQ ID NO: 124, SEQ ID NO: 125, SEQ ID NO: 126, SEQ ID NO: 127, SEQ ID NO: 128, SEQ ID NO: 129, SEQ ID NO: 130, SEQ ID NO: 131, SEQ ID NO: 132, SEQ ID NO: 133, SEQ ID NO: 134, SEQ ID NO: 135, SEQ ID NO: 136, SEQ ID NO: 137, SEQ ID NO: 138, SEQ ID NO: 139, SEQ ID NO: 140, SEQ ID NO: 141, or SEQ ID NO: 142.
   124. The isolated DNA molecule of any one of embodiments 113-123, wherein the third motif comprises SEQ ID NO: 1, SEQ ID NO: 2, SEQ ID NO: 3, SEQ ID NO: 4, SEQ ID NO: 5, SEQ ID NO: 6, SEQ ID NO: 7, SEQ ID NO: 8, SEQ ID NO: 9, SEQ ID NO: 10, SEQ ID NO: 11, SEQ ID NO: 12, SEQ ID NO: 13, SEQ ID NO: 14, SEQ ID NO: 15, SEQ ID NO: 16, SEQ ID NO: 17, SEQ ID NO: 18, SEQ ID NO: 19, SEQ ID NO: 20, SEQ ID NO: 21, SEQ ID NO: 22, SEQ ID NO: 23, SEQ ID NO: 24, SEQ ID NO: 25, SEQ ID NO: 26, SEQ ID NO: 53, SEQ ID NO: 54, SEQ ID NO: 55, SEQ ID NO: 59, SEQ ID NO: 60, SEQ ID NO: 61, SEQ ID NO: 62, SEQ ID NO: 63, SEQ ID NO: 64, SEQ ID NO: 65, SEQ ID NO: 66, SEQ ID NO: 67, SEQ ID NO: 68, SEQ ID NO: 79, SEQ ID NO: 80, SEQ ID NO: 81, SEQ ID NO: 82, SEQ ID NO: 83, SEQ ID NO: 84, SEQ ID NO: 85, SEQ ID NO: 86, SEQ ID NO: 87, SEQ ID NO: 88, SEQ ID NO: 89, SEQ ID NO: 90, SEQ ID NO: 91, SEQ ID NO: 92, SEQ ID NO: 93, SEQ ID NO: 94, SEQ ID NO: 95, SEQ ID NO: 96, SEQ ID NO: 97, SEQ ID NO: 98, SEQ ID NO: 99, SEQ ID NO: 143, or SEQ ID NO: 341, and wherein the first motif and the third motif are different.
   125. The isolated DNA molecule of any one of embodiments 113-124, wherein the fourth motif comprises SEQ ID NO: 27, SEQ ID NO: 28, SEQ ID NO: 29, SEQ ID NO: 30, SEQ ID NO: 31, SEQ ID NO: 32, SEQ ID NO: 33, SEQ ID NO: 34, SEQ ID NO: 35, SEQ ID NO: 36, SEQ ID NO: 37, SEQ ID NO: 38, SEQ ID NO: 39, SEQ ID NO: 40, SEQ ID NO: 41, SEQ ID NO: 42, SEQ ID NO: 43, SEQ ID NO: 44, SEQ ID NO: 45, SEQ ID NO: 46, SEQ ID NO: 47, SEQ ID NO: 48, SEQ ID NO: 49, SEQ ID NO: 50, SEQ ID NO: 51, SEQ ID NO: 52, SEQ ID NO: 56, SEQ ID NO: 57, SEQ ID NO: 58, SEQ ID NO: 69, SEQ ID NO: 70, SEQ ID NO: 71, SEQ ID NO: 72, SEQ ID NO: 73, SEQ ID NO: 74, SEQ ID NO: 75, SEQ ID NO: 76, SEQ ID NO: 77, SEQ ID NO: 78, SEQ ID NO: 121, SEQ ID NO: 122, SEQ ID NO: 123, SEQ ID NO: 124, SEQ ID NO: 125, SEQ ID NO: 126, SEQ ID NO: 127, SEQ ID NO: 128, SEQ ID NO: 129, SEQ ID NO: 130, SEQ ID NO: 131, SEQ ID NO: 132, SEQ ID NO: 133, SEQ ID NO: 134, SEQ ID NO: 135, SEQ ID NO: 136, SEQ ID NO: 137, SEQ ID NO: 138, SEQ ID NO: 139, SEQ ID NO: 140, SEQ ID NO: 141, or SEQ ID NO: 142, and wherein the second motif and the fourth motif are different.
   126. The isolated DNA molecule of any one of embodiments 110-125, further comprising a fifth motif in the LysM1 domain, wherein the fifth motif is modified.
   127. The isolated DNA molecule of embodiment 126, wherein the fifth motif corresponds to amino acids 56-65 of SEQ ID NO: 162 when the receptor polypeptide amino acid sequence is aligned to SEQ ID NO: 162.
   128. The isolated DNA molecule of embodiment 126 or embodiment 127, wherein the fifth motif is modified by substituting at least one, at least two, or at least three amino acid residues in the fifth motif with corresponding amino acid residues that are different in a sixth motif.
   129. The isolated DNA molecule of any one of embodiments 126-128, wherein the fifth motif is substituted with a sixth motif.
   130. The isolated DNA molecule of embodiment 128 or embodiment 129, wherein the sixth motif has a different specificity for oligosaccharides than the fifth motif.
   131. The isolated DNA molecule of any one of embodiments 128-130, wherein the sixth motif is from a second plant LysM receptor polypeptide having the different specificity for oligosaccharides and the sixth motif corresponds to amino acids 56-65 of SEQ ID NO: 162 when the second plant LysM polypeptide amino acid sequence is aligned to SEQ ID NO: 162.
   132. The isolated DNA molecule of any one of embodiments 126-131, wherein the fifth motif comprises SEQ ID NO: 100, SEQ ID NO: 101, SEQ ID NO: 102, SEQ ID NO: 103, SEQ ID NO: 104, SEQ ID NO: 105, SEQ ID NO: 106, SEQ ID NO: 107, SEQ ID NO: 108, SEQ ID NO: 109, SEQ ID NO: 110, SEQ ID NO: 111, SEQ ID NO: 112, SEQ ID NO: 113, SEQ ID NO: 114, SEQ ID NO: 115, SEQ ID NO: 116, SEQ ID NO: 117, SEQ ID NO: 118, SEQ ID NO: 119, or SEQ ID NO: 120.
   133. The isolated DNA molecule of any one of embodiments 128-132, wherein the sixth motif comprises SEQ ID NO: 100, SEQ ID NO: 101, SEQ ID NO: 102, SEQ ID NO: 103, SEQ ID NO: 104, SEQ ID NO: 105, SEQ ID NO: 106, SEQ ID NO: 107, SEQ ID NO: 108, SEQ ID NO: 109, SEQ ID NO: 110, SEQ ID NO: 111, SEQ ID NO: 112, SEQ ID NO: 113, SEQ ID NO: 114, SEQ ID NO: 115, SEQ ID NO: 116, SEQ ID NO: 117, SEQ ID NO: 118, SEQ ID NO: 119, or SEQ ID NO: 120, and wherein the fifth motif and the sixth motif are different.
   134. The isolated DNA molecule of any one of embodiments 110-133, wherein the modified receptor polypeptide binds one or more Nod factors produced by nitrogen-fixing bacteria or by mycorrhizal fungi.
   135. The isolated DNA molecule of embodiment 134, wherein the one or more Nod factors are produced by nitrogen-fixing bacteria selected from the group consisting of Mesorhizobium loti, Mesorhizobium huakuii, Mesorhizobium mediterraneum, Mesorhizobium ciceri, Mesorhizobium spp., Rhizobium mongolense, Rhizobium tropici, Rhizobium etli phaseoli, Rhizobium giardinii, Rhizobium leguminosarum optionally R. leguminosarum trifolii, R. leguminosarum viciae, and R. leguminosarum phaseoli, Burkholderiales optionally symbionts of Mimosa, Sinorhizobium meliloti, Sinorhizobium medicae, Sinorhizobium fredii, Sinorhizobium NGR234, Azorhizobium caulinodans, Bradyrhizobium japonicum, Bradyrhizobium elkanii, Bradyrhizobium liaonginense, Frankia spp., and any combination thereof, or by mycorrhizal fungi selected from the group consisting of Acaulosporaceae spp., Diversisporaceae spp., Gigasporaceae spp., Pacisporaceae spp., Funneliformis spp., Glomus spp., Rhizophagus spp., Sclerocystis spp., Septoglomus spp., Claroideoglomus spp., Ambispora spp., Archaeospora spp., Geosiphon pyriformis, Paraglomus spp., other species in the division Glomeromycota, and any combination thereof.
   136. The isolated DNA molecule of embodiment 134 or embodiment 135, wherein the modified receptor polypeptide binds one or more Nod factors with higher affinity than an unmodified receptor polypeptide.
   137. The isolated DNA molecule of any one of embodiments 134-136, wherein the modified receptor polypeptide binds one or more Nod factors with higher selectivity than an unmodified receptor polypeptide.
   138. The isolated DNA molecule of any one of embodiments 134-137, wherein the modified receptor polypeptide binds one or more Nod factors with altered specificity as compared to an unmodified receptor polypeptide.
   139. The isolated DNA molecule of any one of embodiments 110-138, further comprising a LysM2 domain modified to comprise a hydrophobic patch on the surface of the LysM2 domain, wherein the modified plant LysM receptor polypeptide has enhanced affinity, selectivity, and/or specificity for one or more Nod factors as compared to the unmodified plant LysM receptor polypeptide.
   140. The isolated DNA molecule of embodiment 139, wherein the hydrophobic patch is within 30 Å, 20 Å, 10 Å, 7.5 Å, 5 Å, 4 Å, 3 Å, 2 Å, 1.5 Å, or 1 Å of a chitin binding motif.
   141. The isolated DNA molecule of embodiment 139 or embodiment 140, wherein the LysM2 domain comprises SEQ ID NO: 278, SEQ ID NO: 279, SEQ ID NO: 280, SEQ ID NO: 281, SEQ ID NO: 282, SEQ ID NO: 283, SEQ ID NO: 284, SEQ ID NO: 285, SEQ ID NO: 286, SEQ ID NO: 287, SEQ ID NO: 288, SEQ ID NO: 289, SEQ ID NO: 290, SEQ ID NO: 291, SEQ ID NO: 292, SEQ ID NO: 293, SEQ ID NO: 294, SEQ ID NO: 295, SEQ ID NO: 296, SEQ ID NO: 297, SEQ ID NO: 298, SEQ ID NO: 299, or SEQ ID NO: 300.
   142. The isolated DNA molecule of any one of embodiments 139-141, wherein the hydrophobic patch was generated by deleting at least one non-hydrophobic amino acid residue, substituting at least one amino acid residue with a more hydrophobic amino acid, or combinations thereof.
   143. The isolated DNA molecule of embodiment 142, wherein the at least one amino acid was identified by an amino acid sequence alignment with a LysM2 domain from a LysM high affinity Nod factor receptor that naturally has a hydrophobic patch that interacts with a Nod factor.
   144. The isolated DNA molecule of embodiment 143, wherein the LysM2 domain from a LysM high affinity Nod factor receptor comprises SEQ ID NO: 271, SEQ ID NO: 272, SEQ ID NO: 273, SEQ ID NO: 274, SEQ ID NO: 275, SEQ ID NO: 276, or SEQ ID NO: 277.
   145. The isolated DNA molecule of embodiment 143 or embodiment 144, wherein the at least one amino acid corresponds to the hydrophobic patch residues from SEQ ID NO: 223, SEQ ID NO: 249, SEQ ID NO: 250, SEQ ID NO: 251, SEQ ID NO: 254, SEQ ID NO: 257, or SEQ ID NO: 258.
   146. The isolated DNA molecule of any one of embodiments 142-145, wherein the at least one amino acid was identified by structural modeling to identify a region in LysM2 where the hydrophobic patch can be engineered.
   147. The isolated DNA molecule of embodiment 146, wherein the structural modeling used the unmodified plant LysM amino acid sequence and a LysM domain three dimensional structure that has a known hydrophobic patch.
   148. The isolated DNA molecule of embodiment 147, wherein the LysM domain three dimensional structure is a Medicago truncatula NFP ectodomain.
   149. The isolated DNA molecule of embodiment 147 or embodiment 148, wherein the known hydrophobic patch amino acid residues of the LysM domain three dimensional structure are or correspond to L147, L151, L152, L154, T156, K157 and V158 of the Medicago truncatula NFP ectodomain.
   150. The isolated DNA molecule of embodiment 149, wherein the alpha carbon of at least one amino acid was within 3 Å of an alpha carbon of a known hydrophobic patch amino acid residue in the structural alignment.
   151. The isolated DNA molecule of any one of embodiments 146-150, wherein the structural modeling was performed using SWISS-MODEL, PDB2PQR, APBS, PyMol, and APBS tools 2.1.
   152. The isolated DNA molecule of any one of embodiments 139-151, wherein the modified receptor polypeptide binds one or more Nod factors produced by nitrogen-fixing bacteria or by mycorrhizal fungi.
   153. The isolated DNA molecule of embodiment 152, wherein the one or more Nod factors is produced by nitrogen-fixing bacteria selected from the group consisting of Mesorhizobium loti, Mesorhizobium huakuii, Mesorhizobium mediterraneum, Mesorhizobium ciceri, Mesorhizobium spp., Rhizobium mongolense, Rhizobium tropici, Rhizobium etli phaseoli, Rhizobium giardinii, Rhizobium leguminosarum optionally R. leguminosarum trifolii, R. leguminosarum viciae, and R. leguminosarum phaseoli, Burkholderiales optionally symbionts of Mimosa, Sinorhizobium meliloti, Sinorhizobium medicae, Sinorhizobium fredii, Sinorhizobium NGR234, Azorhizobium caulinodans, Bradyrhizobium japonicum, Bradyrhizobium elkanii, Bradyrhizobium liaonginense, Frankia spp., and any combination thereof, or by mycorrhizal fungi selected from the group consisting of Acaulosporaceae spp., Diversisporaceae spp., Gigasporaceae spp., Pacisporaceae spp., Funneliformis spp., Glomus spp., Rhizophagus spp., Sclerocystis spp., Septoglomus spp., Claroideoglomus spp., Ambispora spp., Archaeospora spp., Geosiphon pyriformis, Paraglomus spp., other species in the division Glomeromycota, and any combination thereof.
   154. The isolated DNA molecule of embodiment 152 or embodiment 153, wherein the modified receptor polypeptide binds the one or more Nod factors with higher affinity than an unmodified receptor polypeptide.
   155. The isolated DNA molecule of any one of embodiments 152-154, wherein the modified receptor polypeptide binds the one or more Nod factors with higher selectivity than an unmodified receptor polypeptide.
   156. The isolated DNA molecule of any one of embodiments 152-156, wherein the modified receptor polypeptide binds the one or more Nod factors with altered specificity as compared to an unmodified receptor polypeptide.
   157. A method of producing a genetically altered plant comprising introducing a genetic alteration to the plant comprising a DNA molecule encoding a modified plant LysM receptor polypeptide comprising a LysM1 domain comprising a first motif and a second motif, wherein the first motif and/or the second motif are modified as compared to the amino acid sequences of the corresponding wild-type plant LysM receptor polypeptide, wherein the encoded modified LysM receptor polypeptide has higher affinity, higher selectivity, and/or altered specificity for one or more Nod factors produced by nitrogen-fixing bacteria or by mycorrhizal fungi than an unmodified LysM receptor polypeptide and the expression of the modified LysM receptor polypeptide allows the plant or part thereof to recognize one or more Nod factors with high affinity, high selectivity, and/or altered specificity.
   158. A method of producing a genetically altered plant comprising genetically editing a gene encoding an endogenous LysM receptor polypeptide in the plant to comprise a DNA molecule encoding a modified plant LysM receptor polypeptide comprising a LysM1 domain comprising a first motif and a second motif, wherein the first motif and/or the second motif are modified as compared to the amino acid sequences of the corresponding wild-type plant LysM receptor polypeptide.
   159. The method of embodiment 157 or embodiment 158, wherein the plant is selected from the group consisting of cassava, corn, cowpea, rice, barley, wheat, Trema spp., apple, pear, plum, apricot, peach, almond, walnut, strawberry, raspberry, blackberry, red currant, black currant, melon, cucumber, pumpkin, squash, grape, bean, soybean, pea, chickpea, cowpea, pigeon pea, lentil, Bambara groundnut, lupin, pulses, Medicago spp., Lotus spp., forage legumes, indigo, legume trees, and hemp.
   160. The method of any one of embodiments 157-159, wherein the first motif corresponds to amino acids 42-48 of SEQ ID NO: 162 when the receptor polypeptide amino acid sequence is aligned to SEQ ID NO: 162 and the second motif corresponds to amino acids 75-80 of SEQ ID NO: 162 when the receptor polypeptide amino acid sequence is aligned to SEQ ID NO: 162.
   161. The method of any one of embodiments 157-159, wherein the first motif corresponds to amino acids 44-49 of SEQ ID NO: 164 when the receptor polypeptide amino acid sequence is aligned to SEQ ID NO: 164 and the second motif corresponds to amino acids 76-81 of SEQ ID NO: 164 when the receptor polypeptide amino acid sequence is aligned to SEQ ID NO: 164.
   162. The method of any one of embodiments 157-161, wherein the first motif is modified by substituting at least one, at least two, or at least three amino acid residues in the first motif with corresponding amino acid residues that are different in a third motif; wherein the second motif is modified by substituting at least one, at least two, or at least three amino acid residues in the second motif with corresponding amino acid residues that are different in a fourth motif.
   163. The method of any one of embodiments 157-161, wherein the first motif is modified by substituting the first motif with a third motif, and/or wherein the second motif is modified by substituting the second motif with a fourth motif.
   164. The method of embodiment 162 or embodiment 163, wherein the third motif and the fourth motif have different affinities, selectivities, and/or specificities for oligosaccharides than the first motif and the second motif.
   165. The method of embodiment 164, wherein the third motif and the fourth motif have different affinities for oligosaccharides than the first motif and the second motif.
   166. The method of embodiment 164, wherein the third motif and the fourth motif have different selectivities for oligosaccharides than the first motif and the second motif.
   167. The method of embodiment 164, wherein the third motif and the fourth motif have different specificities for oligosaccharides than the first motif and the second motif.
   168. The method of any one of embodiments 164-167, wherein the third motif and the fourth motif are from a second plant LysM receptor polypeptide having the different affinity, selectivity and/or specificity for oligosaccharides and the third motif corresponds to amino acids 42-48 of SEQ ID NO: 162 when the second plant LysM polypeptide amino acid sequence is aligned to SEQ ID NO: 162 and the fourth motif corresponds to amino acids 75-80 of SEQ ID NO: 162 when the second plant LysM polypeptide amino acid sequence is aligned to SEQ ID NO: 162.
   169. The method of any one of embodiments 164-167, wherein the third motif and the fourth motif are from a second plant LysM receptor polypeptide having the different affinity, selectivity and/or specificity for oligosaccharides and the third motif corresponds to amino acids 44-49 of SEQ ID NO: 164 when the second plant LysM polypeptide amino acid sequence is aligned to SEQ ID NO: 164 and the fourth motif corresponds to amino acids 76-81 of SEQ ID NO: 164 when the second plant LysM polypeptide amino acid sequence is aligned to SEQ ID NO: 164.
   170. The method of embodiment 168 or embodiment 169, wherein at least one amino acid residue in flanking regions of the receptor polypeptide is different than the corresponding amino acid in the flanking regions of the second plant LysM receptor polypeptide and the flanking regions correspond to amino acids 41, 49-52, 73-74, and 81 of SEQ ID NO: 162, amino acids 47-53, 66-74, and 81-82 of SEQ ID NO: 163, and/or amino acids 43, 50-53, 74-75, and 82 of SEQ ID NO: 164.
   171. The method of any one of embodiments 157-170, wherein the first motif comprises SEQ ID NO: 1, SEQ ID NO: 2, SEQ ID NO: 3, SEQ ID NO: 4, SEQ ID NO: 5, SEQ ID NO: 6, SEQ ID NO: 7, SEQ ID NO: 8, SEQ ID NO: 9, SEQ ID NO: 10, SEQ ID NO: 11, SEQ ID NO: 12, SEQ ID NO: 13, SEQ ID NO: 14, SEQ ID NO: 15, SEQ ID NO: 16, SEQ ID NO: 17, SEQ ID NO: 18, SEQ ID NO: 19, SEQ ID NO: 20, SEQ ID NO: 21, SEQ ID NO: 22, SEQ ID NO: 23, SEQ ID NO: 24, SEQ ID NO: 25, SEQ ID NO: 26, SEQ ID NO: 53, SEQ ID NO: 54, SEQ ID NO: 55, SEQ ID NO: 59, SEQ ID NO: 60, SEQ ID NO: 61, SEQ ID NO: 62, SEQ ID NO: 63, SEQ ID NO: 64, SEQ ID NO: 65, SEQ ID NO: 66, SEQ ID NO: 67, SEQ ID NO: 68, SEQ ID NO: 79, SEQ ID NO: 80, SEQ ID NO: 81, SEQ ID NO: 82, SEQ ID NO: 83, SEQ ID NO: 84, SEQ ID NO: 85, SEQ ID NO: 86, SEQ ID NO: 87, SEQ ID NO: 88, SEQ ID NO: 89, SEQ ID NO: 90, SEQ ID NO: 91, SEQ ID NO: 92, SEQ ID NO: 93, SEQ ID NO: 94, SEQ ID NO: 95, SEQ ID NO: 96, SEQ ID NO: 97, SEQ ID NO: 98, SEQ ID NO: 99, SEQ ID NO: 143, or SEQ ID NO: 341.
   172. The method of any one of embodiments 157-171, wherein the second motif comprises SEQ ID NO: 27, SEQ ID NO: 28, SEQ ID NO: 29, SEQ ID NO: 30, SEQ ID NO: 31, SEQ ID NO: 32, SEQ ID NO: 33, SEQ ID NO: 34, SEQ ID NO: 35, SEQ ID NO: 36, SEQ ID NO: 37, SEQ ID NO: 38, SEQ ID NO: 39, SEQ ID NO: 40, SEQ ID NO: 41, SEQ ID NO: 42, SEQ ID NO: 43, SEQ ID NO: 44, SEQ ID NO: 45, SEQ ID NO: 46, SEQ ID NO: 47, SEQ ID NO: 48, SEQ ID NO: 49, SEQ ID NO: 50, SEQ ID NO: 51, SEQ ID NO: 52, SEQ ID NO: 56, SEQ ID NO: 57, SEQ ID NO: 58, SEQ ID NO: 69, SEQ ID NO: 70, SEQ ID NO: 71, SEQ ID NO: 72, SEQ ID NO: 73, SEQ ID NO: 74, SEQ ID NO: 75, SEQ ID NO: 76, SEQ ID NO: 77, SEQ ID NO: 78, SEQ ID NO: 121, SEQ ID NO: 122, SEQ ID NO: 123, SEQ ID NO: 124, SEQ ID NO: 125, SEQ ID NO: 126, SEQ ID NO: 127, SEQ ID NO: 128, SEQ ID NO: 129, SEQ ID NO: 130, SEQ ID NO: 131, SEQ ID NO: 132, SEQ ID NO: 133, SEQ ID NO: 134, SEQ ID NO: 135, SEQ ID NO: 136, SEQ ID NO: 137, SEQ ID NO: 138, SEQ ID NO: 139, SEQ ID NO: 140, SEQ ID NO: 141, or SEQ ID NO: 142.
   173. The method of any one of embodiments 164-172, wherein the third motif comprises SEQ ID NO: 1, SEQ ID NO: 2, SEQ ID NO: 3, SEQ ID NO: 4, SEQ ID NO: 5, SEQ ID NO: 6, SEQ ID NO: 7, SEQ ID NO: 8, SEQ ID NO: 9, SEQ ID NO: 10, SEQ ID NO: 11, SEQ ID NO: 12, SEQ ID NO: 13, SEQ ID NO: 14, SEQ ID NO: 15, SEQ ID NO: 16, SEQ ID NO: 17, SEQ ID NO: 18, SEQ ID NO: 19, SEQ ID NO: 20, SEQ ID NO: 21, SEQ ID NO: 22, SEQ ID NO: 23, SEQ ID NO: 24, SEQ ID NO: 25, SEQ ID NO: 26, SEQ ID NO: 53, SEQ ID NO: 54, SEQ ID NO: 55, SEQ ID NO: 59, SEQ ID NO: 60, SEQ ID NO: 61, SEQ ID NO: 62, SEQ ID NO: 63, SEQ ID NO: 64, SEQ ID NO: 65, SEQ ID NO: 66, SEQ ID NO: 67, SEQ ID NO: 68, SEQ ID NO: 79, SEQ ID NO: 80, SEQ ID NO: 81, SEQ ID NO: 82, SEQ ID NO: 83, SEQ ID NO: 84, SEQ ID NO: 85, SEQ ID NO: 86, SEQ ID NO: 87, SEQ ID NO: 88, SEQ ID NO: 89, SEQ ID NO: 90, SEQ ID NO: 91, SEQ ID NO: 92, SEQ ID NO: 93, SEQ ID NO: 94, SEQ ID NO: 95, SEQ ID NO: 96, SEQ ID NO: 97, SEQ ID NO: 98, SEQ ID NO: 99, SEQ ID NO: 143, or SEQ ID NO: 341, and wherein the first motif and the third motif are different.
   174. The method of any one of embodiments 163-173, wherein the fourth motif comprises SEQ ID NO: 27, SEQ ID NO: 28, SEQ ID NO: 29, SEQ ID NO: 30, SEQ ID NO: 31, SEQ ID NO: 32, SEQ ID NO: 33, SEQ ID NO: 34, SEQ ID NO: 35, SEQ ID NO: 36, SEQ ID NO: 37, SEQ ID NO: 38, SEQ ID NO: 39, SEQ ID NO: 40, SEQ ID NO: 41, SEQ ID NO: 42, SEQ ID NO: 43, SEQ ID NO: 44, SEQ ID NO: 45, SEQ ID NO: 46, SEQ ID NO: 47, SEQ ID NO: 48, SEQ ID NO: 49, SEQ ID NO: 50, SEQ ID NO: 51, SEQ ID NO: 52, SEQ ID NO: 56, SEQ ID NO: 57, SEQ ID NO: 58, SEQ ID NO: 69, SEQ ID NO: 70, SEQ ID NO: 71, SEQ ID NO: 72, SEQ ID NO: 73, SEQ ID NO: 74, SEQ ID NO: 75, SEQ ID NO: 76, SEQ ID NO: 77, SEQ ID NO: 78, SEQ ID NO: 121, SEQ ID NO: 122, SEQ ID NO: 123, SEQ ID NO: 124, SEQ ID NO: 125, SEQ ID NO: 126, SEQ ID NO: 127, SEQ ID NO: 128, SEQ ID NO: 129, SEQ ID NO: 130, SEQ ID NO: 131, SEQ ID NO: 132, SEQ ID NO: 133, SEQ ID NO: 134, SEQ ID NO: 135, SEQ ID NO: 136, SEQ ID NO: 137, SEQ ID NO: 138, SEQ ID NO: 139, SEQ ID NO: 140, SEQ ID NO: 141, or SEQ ID NO: 142, and wherein the second motif and the fourth motif are different.
   175. The method of any one of embodiments 157-174, wherein the modified plant LysM receptor polypeptide further comprises a fifth motif in the LysM1 domain, wherein the fifth motif is modified.
   176. The method of embodiment 175, wherein the fifth motif corresponds to amino acids 56-65 of SEQ ID NO: 162 when the receptor polypeptide amino acid sequence is aligned to SEQ ID NO: 162.
   177. The method of embodiment 175 or embodiment 176, wherein the fifth motif is modified by substituting at least one, at least two, or at least three amino acid residues in the fifth motif with corresponding amino acid residues that are different in a sixth motif.
   178. The method of embodiment 177, wherein the fifth motif is substituted with a sixth motif.
   179. The method of embodiment 177 or embodiment 178, wherein the sixth motif has a different specificity for oligosaccharides than the fifth motif.
   180. The method of any one of embodiments 177-179, wherein the sixth motif is from a second plant LysM receptor polypeptide having the different specificity for oligosaccharides and the sixth motif corresponds to amino acids 56-65 of SEQ ID NO: 162 when the second plant LysM polypeptide amino acid sequence is aligned to SEQ ID NO: 162.
   181. The method of any one of embodiments 175-180, wherein the fifth motif comprises SEQ ID NO: 100, SEQ ID NO: 101, SEQ ID NO: 102, SEQ ID NO: 103, SEQ ID NO: 104, SEQ ID NO: 105, SEQ ID NO: 106, SEQ ID NO: 107, SEQ ID NO: 108, SEQ ID NO: 109, SEQ ID NO: 110, SEQ ID NO: 111, SEQ ID NO: 112, SEQ ID NO: 113, SEQ ID NO: 114, SEQ ID NO: 115, SEQ ID NO: 116, SEQ ID NO: 117, SEQ ID NO: 118, SEQ ID NO: 119, or SEQ ID NO: 120.
   182. The method of any one of embodiment 177-181, wherein the sixth motif comprises SEQ ID NO: 100, SEQ ID NO: 101, SEQ ID NO: 102, SEQ ID NO: 103, SEQ ID NO: 104, SEQ ID NO: 105, SEQ ID NO: 106, SEQ ID NO: 107, SEQ ID NO: 108, SEQ ID NO: 109, SEQ ID NO: 110, SEQ ID NO: 111, SEQ ID NO: 112, SEQ ID NO: 113, SEQ ID NO: 114, SEQ ID NO: 115, SEQ ID NO: 116, SEQ ID NO: 117, SEQ ID NO: 118, SEQ ID NO: 119, or SEQ ID NO: 120, and wherein the fifth motif and the sixth motif are different.
   183. The method of any one of embodiments 157-182, wherein the modified receptor polypeptide binds one or more Nod factors produced by nitrogen-fixing bacteria or by mycorrhizal fungi with higher affinity, higher selectivity, and/or altered specificity than an unmodified receptor polypeptide.
   184. The method of embodiment 183, wherein the one or more Nod factors are produced by nitrogen-fixing bacteria selected from the group consisting of Mesorhizobium loti, Mesorhizobium huakuii, Mesorhizobium mediterraneum, Mesorhizobium ciceri, Mesorhizobium spp., Rhizobium mongolense, Rhizobium tropici, Rhizobium etli phaseoli, Rhizobium giardinii, Rhizobium leguminosarum optionally R. leguminosarum trifolii, R. leguminosarum viciae, and R. leguminosarum phaseoli, Burkholderiales optionally symbionts of Mimosa, Sinorhizobium meliloti, Sinorhizobium medicae, Sinorhizobium fredii, Sinorhizobium NGR234, Azorhizobium caulinodans, Bradyrhizobium japonicum, Bradyrhizobium elkanii, Bradyrhizobium liaonginense, Frankia spp., and any combination thereof, or by mycorrhizal fungi selected from the group consisting of Acaulosporaceae spp., Diversisporaceae spp., Gigasporaceae spp., Pacisporaceae spp., Funneliformis spp., Glomus spp., Rhizophagus spp., Sclerocystis spp., Septoglomus spp., Claroideoglomus spp., Ambispora spp., Archaeospora spp., Geosiphon pyriformis, Paraglomus spp., other species in the division Glomeromycota, and any combination thereof.
   185. The method of embodiment 183 or embodiment 184, wherein the modified LysM receptor polypeptide is localized to a plant cell plasma membrane.
   186. The method of any one of embodiments 183-185, wherein the modified receptor polypeptide binds one or more Nod factors with higher affinity than an unmodified receptor polypeptide.
   187. The method of any one of embodiments 183-186, wherein the modified receptor polypeptide binds one or more Nod factors with higher selectivity than an unmodified receptor polypeptide.
   188. The method of any one of embodiments 183-187, wherein the modified receptor polypeptide binds one or more Nod factors with altered specificity as compared to an unmodified receptor polypeptide.
   189. The method of any one of embodiments 157-188, wherein the modified plant LysM receptor polypeptide further comprises a LysM2 domain modified to comprise a hydrophobic patch on the surface of the LysM2 domain, wherein the modified plant LysM receptor polypeptide has enhanced affinity, selectivity, and/or specificity for one or more Nod factors as compared to the unmodified plant LysM receptor polypeptide.
   190. The method of embodiment 189, wherein the hydrophobic patch is within 30 Å, 20 Å, 10 Å, 7.5 Å, 5 Å, 4 Å, 3 Å, 2 Å, 1.5 Å, or 1 Å of a chitin binding motif.
   191. The method of embodiment 189 or embodiment 190, wherein the LysM2 domain comprises SEQ ID NO: 278, SEQ ID NO: 279, SEQ ID NO: 280, SEQ ID NO: 281, SEQ ID NO: 282, SEQ ID NO: 283, SEQ ID NO: 284, SEQ ID NO: 285, SEQ ID NO: 286, SEQ ID NO: 287, SEQ ID NO: 288, SEQ ID NO: 289, SEQ ID NO: 290, SEQ ID NO: 291, SEQ ID NO: 292, SEQ ID NO: 293, SEQ ID NO: 294, SEQ ID NO: 295, SEQ ID NO: 296, SEQ ID NO: 297, SEQ ID NO: 298, SEQ ID NO: 299, or SEQ ID NO: 300.
   192. The method of any one of embodiments 189-191, wherein the hydrophobic patch was generated by deleting at least one non-hydrophobic amino acid residue, substituting at least one amino acid residue with a more hydrophobic amino acid, or combinations thereof.
   193. The method of embodiment 192, wherein the at least one amino acid was identified by an amino acid sequence alignment with a LysM2 domain from a LysM high affinity Nod factor receptor that naturally has a hydrophobic patch that interacts with a Nod factor.
   194. The method of embodiment 193, wherein the LysM2 domain from a LysM high affinity Nod factor receptor comprises SEQ ID NO: 271, SEQ ID NO: 272, SEQ ID NO: 273, SEQ ID NO: 274, SEQ ID NO: 275, SEQ ID NO: 276, or SEQ ID NO: 277.
   195. The method of embodiment 193 or embodiment 194, wherein the at least one amino acid corresponds to the hydrophobic patch residues from SEQ ID NO: 223, SEQ ID NO: 249, SEQ ID NO: 250, SEQ ID NO: 251, SEQ ID NO: 254, SEQ ID NO: 257, or SEQ ID NO: 258.
   196. The method of any one of embodiments 193-195, wherein the at least one amino acid was identified by structural modeling to identify a region in LysM2 where the hydrophobic patch can be engineered.
   197. The method of embodiment 196, wherein the structural modeling used the unmodified plant LysM amino acid sequence and a LysM domain three dimensional structure that has a known hydrophobic patch.
   198. The method of embodiment 197, wherein the LysM domain three dimensional structure is a Medicago truncatula NFP ectodomain.
   199. The method of embodiment 197 or embodiment 198, wherein the known hydrophobic patch amino acid residues of the LysM domain three dimensional structure are or correspond to L147, L151, L152, L154, T156, K157 and V158 of the Medicago truncatula NFP ectodomain.
   200. The method of embodiment 199, wherein the alpha carbon of at least one amino acid was within 3 Å of an alpha carbon of a known hydrophobic patch amino acid residue in the structural alignment.
   201. The method of any one of embodiments 196-200, wherein the structural modeling was performed using SWISS-MODEL, PDB2PQR, APBS, PyMol, and APBS tools 2.1.
   202. The method of any one of embodiments 189-201, wherein the modified receptor polypeptide binds one or more Nod factors produced by nitrogen-fixing bacteria or by mycorrhizal fungi.
   203. The method of embodiment 202, wherein the one or more Nod factors is produced by nitrogen-fixing bacteria selected from the group consisting of Mesorhizobium loti, Mesorhizobium huakuii, Mesorhizobium mediterraneum, Mesorhizobium ciceri, Mesorhizobium spp., Rhizobium mongolense, Rhizobium tropici, Rhizobium etli phaseoli, Rhizobium giardinii, Rhizobium leguminosarum optionally R. leguminosarum trifolii, R. leguminosarum viciae, and R. leguminosarum phaseoli, Burkholderiales optionally symbionts of Mimosa, Sinorhizobium meliloti, Sinorhizobium medicae, Sinorhizobium fredii, Sinorhizobium NGR234, Azorhizobium caulinodans, Bradyrhizobium japonicum, Bradyrhizobium elkanii, Bradyrhizobium liaonginense, Frankia spp., and any combination thereof, or by mycorrhizal fungi selected from the group consisting of Acaulosporaceae spp., Diversisporaceae spp., Gigasporaceae spp., Pacisporaceae spp., Funneliformis spp., Glomus spp., Rhizophagus spp., Sclerocystis spp., Septoglomus spp., Claroideoglomus spp., Ambispora spp., Archaeospora spp., Geosiphon pyriformis, Paraglomus spp., other species in the division Glomeromycota, and any combination thereof.
   204. The method of embodiment 202 or embodiment 203, wherein the modified receptor polypeptide binds the one or more Nod factors with higher affinity than an unmodified receptor polypeptide.
   205. The method of any one of embodiments 202-204, wherein the modified receptor polypeptide binds the one or more Nod factors with higher selectivity than an unmodified receptor polypeptide.
   206. The method of any one of embodiments 202-205, wherein the modified receptor polypeptide binds the one or more Nod factors with altered specificity as compared to an unmodified receptor polypeptide.
   207. A genetically altered plant or part thereof produced by the method of any one of embodiments 157-206.
   208. The genetically altered plant or part thereof of embodiment 207, wherein the modified LysM receptor polypeptide is localized to a plant cell plasma membrane.
   209. The genetically altered plant or part thereof of embodiment 208, wherein the plant cell is a root cell.
   210. The genetically altered plant or part thereof of embodiment 209, wherein the root cell is a root epidermal cell.
   211. The genetically altered plant or part thereof of any one of embodiments 207-210, wherein the modified LysM receptor polypeptide is expressed in a developing plant root system.
   212. The genetically altered plant part of any one of embodiments 207-211, wherein the plant part is a leaf, a stem, a root, a root primordia, a flower, a seed, a fruit, a kernel, a grain, a cell, or a portion thereof.
   213. A pollen grain or an ovule of the genetically altered plant of any one of embodiments 207-211.
   214. A protoplast produced from the genetically altered plant of any one of embodiments 207-211.
   215. A tissue culture produced from protoplasts or cells from the plant of any one of embodiments 207-211, wherein the cells or protoplasts are produced from a plant part selected from the group consisting of leaf, anther, pistil, stem, petiole, root, root primordia, root tip, fruit, seed, flower, cotyledon, hypocotyl, embryo, and meristematic cell.
   216. A method of making a modified plant LysM receptor polypeptide comprising generating a nucleic acid encoding a wild-type plant LysM receptor polypeptide that comprises a DNA molecule encoding a modified plant LysM receptor polypeptide comprising a LysM1 domain comprising a first motif and a second motif, wherein the first motif and/or the second motif are modified as compared to the amino acid sequences of the corresponding wild-type plant LysM receptor polypeptide, and wherein the encoded modified plant LysM receptor polypeptide has higher affinity, higher selectivity, and/or altered specificity for one or more Nod factors produced by nitrogen-fixing bacteria or by mycorrhizal fungi than an unmodified plant LysM receptor polypeptide.
   217. The method of embodiment 216, wherein the first motif corresponds to amino acids 42-48 of SEQ ID NO: 162 when the plant LysM receptor polypeptide amino acid sequence is aligned to SEQ ID NO: 162 and the second motif corresponds to amino acids 75-80 of SEQ ID NO: 162 when the plant LysM receptor polypeptide amino acid sequence is aligned to SEQ ID NO: 162.
   218. The method of embodiment 216, wherein the first motif corresponds to amino acids 44-49 of SEQ ID NO: 164 when the plant LysM receptor polypeptide amino acid sequence is aligned to SEQ ID NO: 164 and the second motif corresponds to amino acids 76-81 of SEQ ID NO: 164 when the plant LysM receptor polypeptide amino acid sequence is aligned to SEQ ID NO: 164.
   219. The method of any one of embodiments 216-218, wherein the first motif is modified by substituting at least one, at least two, or at least three amino acid residues in the first motif with corresponding amino acid residues that are different in a third motif; wherein the second motif is modified by substituting at least one, at least two, or at least three amino acid residues in the second motif with corresponding amino acid residues that are different in a fourth motif.
   220. The method of any one of embodiments 216-218, wherein the first motif is modified by substituting the first motif with a third motif, and/or wherein the second motif is modified by substituting the second motif with a fourth motif.
   221. The method of embodiment 219 or embodiment 220, wherein the third motif and the fourth motif have different affinities, selectivities, and/or specificities for oligosaccharides than the first motif and the second motif.
   222. The method of embodiment 221, wherein the third motif and the fourth motif have different affinities for oligosaccharides than the first motif and the second motif.
   223. The method of embodiment 221, wherein the third motif and the fourth motif have different selectivities for oligosaccharides than the first motif and the second motif.
   224. The method of embodiment 221, wherein the third motif and the fourth motif have different specificities for oligosaccharides than the first motif and the second motif.
   225. The method of any one of embodiments 221-224, wherein the third motif and the fourth motif are from a second plant LysM receptor polypeptide having the different affinity, selectivity and/or specificity for oligosaccharides and the third motif corresponds to amino acids 42-48 of SEQ ID NO: 162 when the second plant LysM receptor polypeptide amino acid sequence is aligned to SEQ ID NO: 162 and the fourth motif corresponds to amino acids 75-80 of SEQ ID NO: 162 when the second plant LysM receptor polypeptide amino acid sequence is aligned to SEQ ID NO: 162.
   226. The method of any one of embodiments 221-224, wherein the third motif and the fourth motif are from a second plant LysM receptor polypeptide having the different affinity, selectivity and/or specificity for oligosaccharides and the third motif corresponds to amino acids 44-49 of SEQ ID NO: 164 when the second plant LysM receptor polypeptide amino acid sequence is aligned to SEQ ID NO: 164 and the fourth motif corresponds to amino acids 76-81 of SEQ ID NO: 164 when the second plant LysM receptor polypeptide amino acid sequence is aligned to SEQ ID NO: 164.
   227. The method of embodiment 225 or embodiment 226, wherein at least one amino acid residue in flanking regions of the receptor polypeptide is different than the corresponding amino acid in the flanking regions of the second plant LysM receptor polypeptide and the flanking regions correspond to amino acids 41, 49-52, 73-74, and 81 of SEQ ID NO: 162, amino acids 47-53, 66-74, and 81-82 of SEQ ID NO: 163, and/or amino acids 43, 50-53, 74-75, and 82 of SEQ ID NO: 164.
   228. The method of any one of embodiments 216-227, wherein the first motif comprises SEQ ID NO: 1, SEQ ID NO: 2, SEQ ID NO: 3, SEQ ID NO: 4, SEQ ID NO: 5, SEQ ID NO: 6, SEQ ID NO: 7, SEQ ID NO: 8, SEQ ID NO: 9, SEQ ID NO: 10, SEQ ID NO: 11, SEQ ID NO: 12, SEQ ID NO: 13, SEQ ID NO: 14, SEQ ID NO: 15, SEQ ID NO: 16, SEQ ID NO: 17, SEQ ID NO: 18, SEQ ID NO: 19, SEQ ID NO: 20, SEQ ID NO: 21, SEQ ID NO: 22, SEQ ID NO: 23, SEQ ID NO: 24, SEQ ID NO: 25, SEQ ID NO: 26, SEQ ID NO: 53, SEQ ID NO: 54, SEQ ID NO: 55, SEQ ID NO: 59, SEQ ID NO: 60, SEQ ID NO: 61, SEQ ID NO: 62, SEQ ID NO: 63, SEQ ID NO: 64, SEQ ID NO: 65, SEQ ID NO: 66, SEQ ID NO: 67, SEQ ID NO: 68, SEQ ID NO: 79, SEQ ID NO: 80, SEQ ID NO: 81, SEQ ID NO: 82, SEQ ID NO: 83, SEQ ID NO: 84, SEQ ID NO: 85, SEQ ID NO: 86, SEQ ID NO: 87, SEQ ID NO: 88, SEQ ID NO: 89, SEQ ID NO: 90, SEQ ID NO: 91, SEQ ID NO: 92, SEQ ID NO: 93, SEQ ID NO: 94, SEQ ID NO: 95, SEQ ID NO: 96, SEQ ID NO: 97, SEQ ID NO: 98, SEQ ID NO: 99, SEQ ID NO: 143, or SEQ ID NO: 341.
   229. The method of any one of embodiments 216-228, wherein the second motif comprises SEQ ID NO: 27, SEQ ID NO: 28, SEQ ID NO: 29, SEQ ID NO: 30, SEQ ID NO: 31, SEQ ID NO: 32, SEQ ID NO: 33, SEQ ID NO: 34, SEQ ID NO: 35, SEQ ID NO: 36, SEQ ID NO: 37, SEQ ID NO: 38, SEQ ID NO: 39, SEQ ID NO: 40, SEQ ID NO: 41, SEQ ID NO: 42, SEQ ID NO: 43, SEQ ID NO: 44, SEQ ID NO: 45, SEQ ID NO: 46, SEQ ID NO: 47, SEQ ID NO: 48, SEQ ID NO: 49, SEQ ID NO: 50, SEQ ID NO: 51, SEQ ID NO: 52, SEQ ID NO: 56, SEQ ID NO: 57, SEQ ID NO: 58, SEQ ID NO: 69, SEQ ID NO: 70, SEQ ID NO: 71, SEQ ID NO: 72, SEQ ID NO: 73, SEQ ID NO: 74, SEQ ID NO: 75, SEQ ID NO: 76, SEQ ID NO: 77, SEQ ID NO: 78, SEQ ID NO: 121, SEQ ID NO: 122, SEQ ID NO: 123, SEQ ID NO: 124, SEQ ID NO: 125, SEQ ID NO: 126, SEQ ID NO: 127, SEQ ID NO: 128, SEQ ID NO: 129, SEQ ID NO: 130, SEQ ID NO: 131, SEQ ID NO: 132, SEQ ID NO: 133, SEQ ID NO: 134, SEQ ID NO: 135, SEQ ID NO: 136, SEQ ID NO: 137, SEQ ID NO: 138, SEQ ID NO: 139, SEQ ID NO: 140, SEQ ID NO: 141, or SEQ ID NO: 142.
   230. The method of any one of embodiments 219-229, wherein the third motif comprises SEQ ID NO: 1, SEQ ID NO: 2, SEQ ID NO: 3, SEQ ID NO: 4, SEQ ID NO: 5, SEQ ID NO: 6, SEQ ID NO: 7, SEQ ID NO: 8, SEQ ID NO: 9, SEQ ID NO: 10, SEQ ID NO: 11, SEQ ID NO: 12, SEQ ID NO: 13, SEQ ID NO: 14, SEQ ID NO: 15, SEQ ID NO: 16, SEQ ID NO: 17, SEQ ID NO: 18, SEQ ID NO: 19, SEQ ID NO: 20, SEQ ID NO: 21, SEQ ID NO: 22, SEQ ID NO: 23, SEQ ID NO: 24, SEQ ID NO: 25, SEQ ID NO: 26, SEQ ID NO: 53, SEQ ID NO: 54, SEQ ID NO: 55, SEQ ID NO: 59, SEQ ID NO: 60, SEQ ID NO: 61, SEQ ID NO: 62, SEQ ID NO: 63, SEQ ID NO: 64, SEQ ID NO: 65, SEQ ID NO: 66, SEQ ID NO: 67, SEQ ID NO: 68, SEQ ID NO: 79, SEQ ID NO: 80, SEQ ID NO: 81, SEQ ID NO: 82, SEQ ID NO: 83, SEQ ID NO: 84, SEQ ID NO: 85, SEQ ID NO: 86, SEQ ID NO: 87, SEQ ID NO: 88, SEQ ID NO: 89, SEQ ID NO: 90, SEQ ID NO: 91, SEQ ID NO: 92, SEQ ID NO: 93, SEQ ID NO: 94, SEQ ID NO: 95, SEQ ID NO: 96, SEQ ID NO: 97, SEQ ID NO: 98, SEQ ID NO: 99, SEQ ID NO: 143, or SEQ ID NO: 341, and wherein the first motif and the third motif are different.
   231. The method of any one of embodiments 219-230, wherein the fourth motif comprises SEQ ID NO: 27, SEQ ID NO: 28, SEQ ID NO: 29, SEQ ID NO: 30, SEQ ID NO: 31, SEQ ID NO: 32, SEQ ID NO: 33, SEQ ID NO: 34, SEQ ID NO: 35, SEQ ID NO: 36, SEQ ID NO: 37, SEQ ID NO: 38, SEQ ID NO: 39, SEQ ID NO: 40, SEQ ID NO: 41, SEQ ID NO: 42, SEQ ID NO: 43, SEQ ID NO: 44, SEQ ID NO: 45, SEQ ID NO: 46, SEQ ID NO: 47, SEQ ID NO: 48, SEQ ID NO: 49, SEQ ID NO: 50, SEQ ID NO: 51, SEQ ID NO: 52, SEQ ID NO: 56, SEQ ID NO: 57, SEQ ID NO: 58, SEQ ID NO: 69, SEQ ID NO: 70, SEQ ID NO: 71, SEQ ID NO: 72, SEQ ID NO: 73, SEQ ID NO: 74, SEQ ID NO: 75, SEQ ID NO: 76, SEQ ID NO: 77, SEQ ID NO: 78, SEQ ID NO: 121, SEQ ID NO: 122, SEQ ID NO: 123, SEQ ID NO: 124, SEQ ID NO: 125, SEQ ID NO: 126, SEQ ID NO: 127, SEQ ID NO: 128, SEQ ID NO: 129, SEQ ID NO: 130, SEQ ID NO: 131, SEQ ID NO: 132, SEQ ID NO: 133, SEQ ID NO: 134, SEQ ID NO: 135, SEQ ID NO: 136, SEQ ID NO: 137, SEQ ID NO: 138, SEQ ID NO: 139, SEQ ID NO: 140, SEQ ID NO: 141, or SEQ ID NO: 142, and wherein the second motif and the fourth motif are different.
   232. The method of any one of embodiments 216-231, wherein the modified plant LysM receptor polypeptide further comprises a fifth motif in the LysM1 domain, wherein the fifth motif is modified.
   233. The method of embodiment 232, wherein the fifth motif corresponds to amino acids 56-65 of SEQ ID NO: 162 when the plant LysM receptor polypeptide amino acid sequence is aligned to SEQ ID NO: 162.
   234. The method of embodiment 232 or embodiment 233, wherein the fifth motif is modified by substituting at least one, at least two, or at least three amino acid residues in the fifth motif with corresponding amino acid residues that are different in a sixth motif.
   235. The method of embodiment 234, wherein the fifth motif is substituted with a sixth motif.
   236. The method of embodiment 234 or embodiment 235, wherein the sixth motif has a different specificity for oligosaccharides than the fifth motif.
   237. The method of any one of embodiments 234-236, wherein the sixth motif is from a second plant LysM receptor polypeptide having the different specificity for oligosaccharides and the sixth motif corresponds to amino acids 56-65 of SEQ ID NO: 162 when the second plant LysM polypeptide amino acid sequence is aligned to SEQ ID NO: 162.
   238. The method of any one of embodiments 232-237, wherein the fifth motif comprises SEQ ID NO: 100, SEQ ID NO: 101, SEQ ID NO: 102, SEQ ID NO: 103, SEQ ID NO: 104, SEQ ID NO: 105, SEQ ID NO: 106, SEQ ID NO: 107, SEQ ID NO: 108, SEQ ID NO: 109, SEQ ID NO: 110, SEQ ID NO: 111, SEQ ID NO: 112, SEQ ID NO: 113, SEQ ID NO: 114, SEQ ID NO: 115, SEQ ID NO: 116, SEQ ID NO: 117, SEQ ID NO: 118, SEQ ID NO: 119, or SEQ ID NO: 120.
   239. The method of any one of embodiment 232-238, wherein the sixth motif comprises SEQ ID NO: 100, SEQ ID NO: 101, SEQ ID NO: 102, SEQ ID NO: 103, SEQ ID NO: 104, SEQ ID NO: 105, SEQ ID NO: 106, SEQ ID NO: 107, SEQ ID NO: 108, SEQ ID NO: 109, SEQ ID NO: 110, SEQ ID NO: 111, SEQ ID NO: 112, SEQ ID NO: 113, SEQ ID NO: 114, SEQ ID NO: 115, SEQ ID NO: 116, SEQ ID NO: 117, SEQ ID NO: 118, SEQ ID NO: 119, or SEQ ID NO: 120, and wherein the fifth motif and the sixth motif are different.
   240. The method of any one of embodiments 216-239, wherein the modified plant LysM receptor polypeptide binds one or more Nod factors produced by nitrogen-fixing bacteria or by mycorrhizal fungi with higher affinity, higher selectivity, and/or altered specificity than an unmodified plant LysM receptor polypeptide.
   241. The method of embodiment 240, wherein the one or more Nod factors are produced by nitrogen-fixing bacteria selected from the group consisting of Mesorhizobium loti, Mesorhizobium huakuii, Mesorhizobium mediterraneum, Mesorhizobium ciceri, Mesorhizobium spp., Rhizobium mongolense, Rhizobium tropici, Rhizobium etli phaseoli, Rhizobium giardinii, Rhizobium leguminosarum optionally R. leguminosarum trifolii, R. leguminosarum viciae, and R. leguminosarum phaseoli, Burkholderiales optionally symbionts of Mimosa, Sinorhizobium meliloti, Sinorhizobium medicae, Sinorhizobium fredii, Sinorhizobium NGR234, Azorhizobium caulinodans, Bradyrhizobium japonicum, Bradyrhizobium elkanii, Bradyrhizobium liaonginense, Frankia spp., and any combination thereof, or by mycorrhizal fungi selected from the group consisting of Acaulosporaceae spp., Diversisporaceae spp., Gigasporaceae spp., Pacisporaceae spp., Funneliformis spp., Glomus spp., Rhizophagus spp., Sclerocystis spp., Septoglomus spp., Claroideoglomus spp., Ambispora spp., Archaeospora spp., Geosiphon pyriformis, Paraglomus spp., other species in the division Glomeromycota, and any combination thereof.
   242. The method of embodiment 240 or embodiment 241, wherein the modified receptor polypeptide binds one or more Nod factors with higher affinity than an unmodified receptor polypeptide.
   243. The method of any one of embodiments 240-242, wherein the modified receptor polypeptide binds one or more Nod factors with higher selectivity than an unmodified receptor polypeptide.
   244. The method of any one of embodiments 240-243, wherein the modified receptor polypeptide binds one or more Nod factors with altered specificity as compared to an unmodified receptor polypeptide.
   245. The method of any one of embodiments 216-244, wherein the modified plant LysM receptor polypeptide further comprises a LysM2 domain modified to comprise a hydrophobic patch on the surface of the LysM2 domain, wherein the modified plant LysM receptor polypeptide has enhanced affinity, selectivity, and/or specificity for one or more Nod factors as compared to the unmodified plant LysM receptor polypeptide.
   246. The method of embodiment 245, wherein the hydrophobic patch is within 30 Å, 20 Å, 10 Å, 7.5 Å, 5 Å, 4 Å, 3 Å, 2 Å, 1.5 Å, or 1 Å of a chitin binding motif.
   247. The method of embodiment 245 or embodiment 246, wherein the LysM2 domain comprises SEQ ID NO: 278, SEQ ID NO: 279, SEQ ID NO: 280, SEQ ID NO: 281, SEQ ID NO: 282, SEQ ID NO: 283, SEQ ID NO: 284, SEQ ID NO: 285, SEQ ID NO: 286, SEQ ID NO: 287, SEQ ID NO: 288, SEQ ID NO: 289, SEQ ID NO: 290, SEQ ID NO: 291, SEQ ID NO: 292, SEQ ID NO: 293, SEQ ID NO: 294, SEQ ID NO: 295, SEQ ID NO: 296, SEQ ID NO: 297, SEQ ID NO: 298, SEQ ID NO: 299, or SEQ ID NO: 300.
   248. The method of any one of embodiments 245-247, wherein the hydrophobic patch was generated by deleting at least one non-hydrophobic amino acid residue, substituting at least one amino acid residue with a more hydrophobic amino acid, or combinations thereof.
   249. The method of embodiment 248, wherein the at least one amino acid was identified by an amino acid sequence alignment with a LysM2 domain from a LysM high affinity Nod factor receptor that naturally has a hydrophobic patch that interacts with a Nod factor.
   250. The method of embodiment 249, wherein the LysM2 domain from a LysM high affinity Nod factor receptor comprises SEQ ID NO: 271, SEQ ID NO: 272, SEQ ID NO: 273, SEQ ID NO: 274, SEQ ID NO: 275, SEQ ID NO: 276, or SEQ ID NO: 277.
   251. The method of embodiment 249 or embodiment 250, wherein the at least one amino acid corresponds to the hydrophobic patch residues from SEQ ID NO: 223, SEQ ID NO: 249, SEQ ID NO: 250, SEQ ID NO: 251, SEQ ID NO: 254, SEQ ID NO: 257, or SEQ ID NO: 258.
   252. The method of any one of embodiments 249-251, wherein the at least one amino acid was identified by structural modeling to identify a region in LysM2 where the hydrophobic patch can be engineered.
   253. The method of embodiment 252, wherein the structural modeling used the unmodified plant LysM amino acid sequence and a LysM domain three dimensional structure that has a known hydrophobic patch.
   254. The method of embodiment 253, wherein the LysM domain three dimensional structure is a Medicago truncatula NFP ectodomain.
   255. The method of embodiment 253 or embodiment 254, wherein the known hydrophobic patch amino acid residues of the LysM domain three dimensional structure are or correspond to L147, L151, L152, L154, T156, K157 and V158 of the Medicago truncatula NFP ectodomain.
   256. The method of embodiment 255, wherein the alpha carbon of at least one amino acid was within 3 Å of an alpha carbon of a known hydrophobic patch amino acid residue in the structural alignment.
   257. The method of any one of embodiments 252-256, wherein the structural modeling was performed using SWISS-MODEL, PDB2PQR, APBS, PyMol, and APBS tools 2.1.
   258. The method of any one of embodiments 245-257, wherein the modified receptor polypeptide binds one or more Nod factors produced by nitrogen-fixing bacteria or by mycorrhizal fungi.
   259. The method of embodiment 258, wherein the one or more Nod factors is produced by nitrogen-fixing bacteria selected from the group consisting of Mesorhizobium loti, Mesorhizobium huakuii, Mesorhizobium mediterraneum, Mesorhizobium ciceri, Mesorhizobium spp., Rhizobium mongolense, Rhizobium tropici, Rhizobium etli phaseoli, Rhizobium giardinii, Rhizobium leguminosarum optionally R. leguminosarum trifolii, R. leguminosarum viciae, and R. leguminosarum phaseoli, Burkholderiales optionally symbionts of Mimosa, Sinorhizobium meliloti, Sinorhizobium medicae, Sinorhizobium fredii, Sinorhizobium NGR234, Azorhizobium caulinodans, Bradyrhizobium japonicum, Bradyrhizobium elkanii, Bradyrhizobium liaonginense, Frankia spp., and any combination thereof, or by mycorrhizal fungi selected from the group consisting of Acaulosporaceae spp., Diversisporaceae spp., Gigasporaceae spp., Pacisporaceae spp., Funneliformis spp., Glomus spp., Rhizophagus spp., Sclerocystis spp., Septoglomus spp., Claroideoglomus spp., Ambispora spp., Archaeospora spp., Geosiphon pyriformis, Paraglomus spp., other species in the division Glomeromycota, and any combination thereof.
   260. The method of embodiment 258 or embodiment 259, wherein the modified receptor polypeptide binds the one or more Nod factors with higher affinity than an unmodified receptor polypeptide.
   261. The method of any one of embodiments 258-260, wherein the modified receptor polypeptide binds the one or more Nod factors with higher selectivity than an unmodified receptor polypeptide.
   262. The method of any one of embodiments 258-261, wherein the modified receptor polypeptide binds the one or more Nod factors with altered specificity as compared to an unmodified receptor polypeptide.
   263. The method of any one of embodiments 216-262, wherein the nucleic acid is generated by site-directed mutagenesis, by chemical synthesis, by genetic editing, or by genetic engineering.
   264. The method of any one of embodiments 216-263, wherein the nucleic acid is an endogenous plant gene in a plant cell.
   265. The method of any one of embodiments 216-264, wherein the nucleic acid sequence is operably linked to a promoter.
   266. The method of embodiment 265, wherein the promoter is a root specific promoter, a constitutive promoters, or a combination thereof.
   267. The method of embodiment 265 or embodiment 266, wherein the promoter is selected from the group consisting of a NFR1 promoter, a NFR5NFP promoter, a LYK3 promoter, a CERK6 promoter, a NFR5/NFP promoter, a Lotus japonicus NFR5 promoter (SEQ ID NO: 261), a Lotus japonicus NFR1 promoter (SEQ ID NO: 261), a Lotus japonicus CERK6 promoter (SEQ ID NO: 264), a Medicago truncatula NFP promoter (SEQ ID NO: 263), a Medicago truncatula LYK3 promoter (SEQ ID NO: 262), a maize allothioneine promoter, a chitinase promoter, a maize ZRP2 promoter, a tomato LeExtl promoter, a glutamine synthetase soybean root promoter, a RCC3 promoter, a rice antiquitine promoter, a LRR receptor kinase promoter, and an Arabidopsis pCO2 promoter.
   268. The method of any one of embodiments 265-267, wherein the nucleic acid sequence is inserted into the genome of the plant so that the nucleic acid sequence is operably linked to an endogenous promoter.
   269. The method of embodiment 268, wherein the endogenous promoter is a root specific promoter.
   270. A genetically altered plant comprising the modified plant LysM receptor polypeptide encoded by the nucleic acid of any one of embodiments 216-269.
   271. The plant of embodiment 270, wherein the plant is selected from the group consisting of cassava, corn, cowpea, rice, barley, wheat, Trema spp., apple, pear, plum, apricot, peach, almond, walnut, strawberry, raspberry, blackberry, red currant, black currant, melon, cucumber, pumpkin, squash, grape, bean, soybean, pea, chickpea, cowpea, pigeon pea, lentil, Bambara groundnut, lupin, pulses, Medicago spp., Lotus spp., forage legumes, indigo, legume trees, and hemp.
   272. The genetically altered plant of embodiment 270 or embodiment 271, wherein the nucleic acid is a transgene.
   273. The genetically altered plant of embodiment 270 or embodiment 271, wherein the nucleic acid is an endogenous plant LysM receptor gene.
   274. A method of making a modified plant LysM receptor polypeptide comprising generating a nucleic acid encoding a wild-type plant LysM receptor polypeptide that comprises a DNA molecule encoding a modified plant LysM receptor polypeptide comprising a LysM1 domain comprising a first motif and a second motif, wherein the first motif and/or the second motif are modified as compared to the amino acid sequences of the corresponding wild-type plant LysM receptor polypeptide, and wherein the encoded modified plant LysM receptor polypeptide has higher affinity, higher selectivity, and/or altered specificity for one or more Nod factors produced by nitrogen-fixing bacteria or by mycorrhizal fungi than an unmodified plant LysM receptor polypeptide.
   275. The method of embodiment 274, wherein the first motif corresponds to amino acids 42-48 of SEQ ID NO: 162 when the plant LysM receptor polypeptide amino acid sequence is aligned to SEQ ID NO: 162 and the second motif corresponds to amino acids 75-80 of SEQ ID NO: 162 when the plant LysM receptor polypeptide amino acid sequence is aligned to SEQ ID NO: 162; or wherein the first motif corresponds to amino acids 44-49 of SEQ ID NO: 164 when the plant LysM receptor polypeptide amino acid sequence is aligned to SEQ ID NO: 164 and the second motif corresponds to amino acids 76-81 of SEQ ID NO: 164 when the plant LysM receptor polypeptide amino acid sequence is aligned to SEQ ID NO: 164.
   276. The method of embodiment 274 or embodiment 275, wherein the first motif is modified by substituting at least one, at least two, or at least three amino acid residues in the first motif with corresponding amino acid residues that are different in a third motif; wherein the second motif is modified by substituting at least one, at least two, or at least three amino acid residues in the second motif with corresponding amino acid residues that are different in a fourth motif; and/or wherein the first motif is modified by substituting the first motif with a third motif, and/or wherein the second motif is modified by substituting the second motif with a fourth motif.
   277. The method of embodiment 276, wherein the third motif and the fourth motif have different affinities, selectivities, and/or specificities for oligosaccharides than the first motif and the second motif.
   278. The method of embodiment 277, wherein the third motif and the fourth motif are from a second plant LysM receptor polypeptide having the different affinity, selectivity and/or specificity for oligosaccharides and the third motif corresponds to amino acids 42-48 of SEQ ID NO: 162 when the second plant LysM receptor polypeptide amino acid sequence is aligned to SEQ ID NO: 162 and the fourth motif corresponds to amino acids 75-80 of SEQ ID NO: 162 when the second plant LysM receptor polypeptide amino acid sequence is aligned to SEQ ID NO: 162; or wherein the third motif and the fourth motif are from a second plant LysM receptor polypeptide having the different affinity, selectivity and/or specificity for oligosaccharides and the third motif corresponds to amino acids 44-49 of SEQ ID NO: 164 when the second plant LysM receptor polypeptide amino acid sequence is aligned to SEQ ID NO: 164 and the fourth motif corresponds to amino acids 76-81 of SEQ ID NO: 164 when the second plant LysM receptor polypeptide amino acid sequence is aligned to SEQ ID NO: 164.
   279. The method of any one of embodiments 274-278, wherein the modified plant LysM receptor polypeptide further comprises a fifth motif in the LysM1 domain, wherein the fifth motif is modified.
   280. The method of embodiment 279, wherein the fifth motif corresponds to amino acids 56-65 of SEQ ID NO: 162 when the plant LysM receptor polypeptide amino acid sequence is aligned to SEQ ID NO: 162.
   281. The method of embodiment 279 or embodiment 280, wherein the fifth motif is modified by substituting at least one, at least two, or at least three amino acid residues in the fifth motif with corresponding amino acid residues that are different in a sixth motif; and/or wherein the fifth motif is substituted with a sixth motif.
   282. The method of embodiment 281, wherein the sixth motif has a different specificity for oligosaccharides than the fifth motif.
   283. The method of embodiment 281 or embodiment 282, wherein the sixth motif is from a second plant LysM receptor polypeptide having the different specificity for oligosaccharides and the sixth motif corresponds to amino acids 56-65 of SEQ ID NO: 162 when the second plant LysM polypeptide amino acid sequence is aligned to SEQ ID NO: 162.
   284. The method of any one of embodiments 274-283, wherein the modified plant LysM receptor polypeptide binds one or more Nod factors produced by nitrogen-fixing bacteria or by mycorrhizal fungi with higher affinity, higher selectivity, and/or altered specificity than an unmodified plant LysM receptor polypeptide.
   285. The method of any one of embodiments 274-284, wherein the modified plant LysM receptor polypeptide further comprises a LysM2 domain modified to comprise a hydrophobic patch on the surface of the LysM2 domain, wherein the modified plant LysM receptor polypeptide has enhanced affinity, selectivity, and/or specificity for one or more Nod factors as compared to the unmodified plant LysM receptor polypeptide.
   286. The method of embodiment 285, wherein the hydrophobic patch was generated by deleting at least one non-hydrophobic amino acid residue, substituting at least one amino acid residue with a more hydrophobic amino acid, or combinations thereof.
   287. The method of any one of embodiments 274-286, wherein the nucleic acid is generated by site-directed mutagenesis, by chemical synthesis, by genetic editing, or by genetic engineering.
   288. The method of any one of embodiments 274-287, wherein the nucleic acid is an endogenous plant gene in a plant cell.
   289. A method of generating a modified plant LysM receptor polypeptide comprising:
[0033] (a) providing a heterologous Nod factor LysM receptor polypeptide model comprising a structural model, a molecular model, a surface characteristics model, and/or an electrostatic potential model of a LysM1 domain, a LysM2 domain, a LysM3 domain, any combination thereof, or the ectodomain of the heterologous Nod factor LysM receptor polypeptide having selectivity for a beneficial nitrogen-fixing bacteria or a beneficial mycorrhizal fungus and an unmodified endogenous LysM receptor polypeptide;
[0034] (b) identifying a first motif, a second motif, and/or optionally a fifth motif for modification in the unmodified endogenous LysM receptor polypeptide by comparing a LysM1 domain of the unmodified endogenous LysM receptor polypeptide with the corresponding LysM1 domain of the heterologous Nod factor LysM receptor polypeptide model;
[0035] (c) modifying the first motif by substituting at least one, at least two, or at least three amino acid residues in the first motif with corresponding amino acid residues that are different in a third motif, modifying the second motif by substituting at least one, at least two, or at least three amino acid residues in the second motif with corresponding amino acid residues that are different in a fourth motif, and/or optionally modifying the fifth motif by substituting at least one, at least two, or at least three amino acid residues in the fifth motif with corresponding amino acid residues that are different in a sixth motif, wherein the third motif, the fourth motif, and the sixth motif have different affinities, selectivities, and/or specificities for oligosaccharides than the first motif, the second motif, and the fifth motif; and
[0036] (d) generating the modified endogenous LysM receptor polypeptide wherein the first motif, the second motif, and/or optionally the fifth motif have been substituted with corresponding amino acid residues from the third motif, the fourth motif, and/or optionally the sixth motif.
   290. A genetically altered plant comprising the modified plant LysM receptor polypeptide encoded by the nucleic acid of any one of embodiments 274-286.
   291. The plant of embodiment 290, wherein the plant is selected from the group consisting of cassava, corn, cowpea, rice, barley, wheat, Trema spp., apple, pear, plum, apricot, peach, almond, walnut, strawberry, raspberry, blackberry, red currant, black currant, melon, cucumber, pumpkin, squash, grape, bean, soybean, pea, chickpea, cowpea, pigeon pea, lentil, Bambara groundnut, lupin, pulses, Medicago spp., Lotus spp., forage legumes, indigo, legume trees, and hemp.
   292. The genetically altered plant of embodiment 290 or embodiment 291, wherein the nucleic acid is a transgene.
   293. The genetically altered plant of embodiment 290 or embodiment 291, wherein the nucleic acid is an endogenous plant LysM receptor gene.

### BRIEF DESCRIPTION OF THE DRAWINGS

[0037] The patent or application file contains at least one drawing executed in color. Copies of this patent or patent application publication with color drawing(s) will be provided by the Office upon request and payment of the necessary fee.

[0038] FIGS. 1A-1E show LysM receptor kinase proteins and expression constructs. FIG. 1A shows schematic diagrams of NFR1 (top, white boxes) and CERK6 (bottom, green boxes). From N to C terminus, the boxes represent LysM domains of the ectodomain (LysM1, LysM2 and LysM3), transmembrane and juxtamembrane domains (TJ), and the kinase domain (KD). The dotted lines and indicated amino acids (A226 and L325 for NFR1; G226 and L325 for CERK6) specify boundaries between the analyzed domains. FIG. 1B shows schematic diagrams of gene structures of Medicago truncatula LYK3 (Lyk3, MTR_5g086130, top), Lotus japonicus NFR1 (Nfr1, Lj2g3v2904690, middle), and L. japonicus CERK6 (Cerk6, Lj6g3v1055580, bottom). Exons are depicted as black boxes and introns are depicted as black lines. Numbers above the gene structure diagrams display the nucleotide count, and the overall length in kilobases (kb) is indicated below the gene structure diagrams. FIG. 1C shows a protein alignment of amino acid sequences of L. japonicus NFR1 (LjNFR1, top row, SEQ ID NO: 162), M. truncatula LYK3 (MtLYK3, middle row, SEQ ID NO: 163), and L. japonicus CERK6 (LjCERK6, bottom row, SEQ ID NO: 164). Above the alignment, conserved cysteine residues are indicated with red arrows, residues that were mutated to tryptophan in constructs 23, 24, 31, and 32 are indicated with blue circles, and brackets indicate the boundaries of the ectodomain (EC), transmembrane and juxtamembrane domains (TM+JM), and the intracellular (IC) region of the proteins. Within the EC, the dotted red lines indicate the boundaries between the LysM1, LysM2 and LysM3 domains. Regions I, II, III, and IV within the LysM1 domain are also indicated by brackets above the alignment. FIG. 1D shows schematics of LysM receptor kinase protein expression constructs. As shown at left in grey, each construct has an expression cassette encoding the transformation marker triple YFP (tYFP) with a nuclear localization signal (NLS) driven by the Ubiquitin promoter (pUbi) and nod terminator (tnos). As shown at right, each construct also has an expression cassette encoding a LysM receptor kinase protein, including, from top to bottom, L. japonicus Nfr1 (genomic Nfr1) fused to a 6× histidine tag (6×-his) under control of the L. japonicus Nfr1 promoter and terminator (pLjNfr1 and tLjNFR1, respectively) (expression cassette in white); L. japonicus Cerk6 (genomic Cerk6) fused to a 6× histidine tag (6×-his) under control of the L. japonicus Cerk6 promoter and terminator (pLjCerk6 and tLjCerk6, respectively) (expression cassette in green); and M. truncatula Lyk3 (genomic Lyk3) fused to a 6× histidine (6×-his) tag under control of the M. truncatula Lyk3 promoter and the 35S terminator (pMtLyk3 and t35S, respectively) (expression cassette in blue). While FIG. 1D shows expression constructs encoding the genomic coding sequences of Nfr1, Cerk6, and Lyk3, equivalent constructs were used to express chimeric alleles of LysM receptor kinase proteins under control of the different promoters. FIG. 1E shows a schematic of constructs for expression of receptors in N. benthamiana (tobacco) leaves. At left, the first expression cassette encodes the plasma membrane localization marker A. thaliana PIP2A (AtPIP2A) fused to mCherry, under control of the Ubiquitin promoter (pUbi) and nod terminator (tnos). At right, the second expression cassette encodes a LysM receptor kinase protein Nfr1/chimera (i.e., Nfr1 or a chimeric protein) fused to eYFP under control of the 35S promoter (p355) and terminator (t35S). LB and RB indicate the T-DNA left border and right border, respectively.

[0039] FIGS. 2A-2C show results of functional studies measuring nodulation and reactive oxygen species (ROS) formation using chimeras of the L. japonicus LysM receptor kinase proteins NFR1 and CERK6. FIG. 2A shows nodule formation observed on roots of L. japonicus nfr1-1 mutants tested with different protein constructs, including NFR1 (construct 1) or NFR1/CERK6 chimeras (constructs 2-8), under control of the Nfr1 promoter. The x-axis indicates the identity of the LysM receptor kinase construct, and the y-axis indicates the number of nodules formed per plant. FIG. 2B shows representative images of L. japonicus nfr1-1 roots expressing, from top to bottom, NFR1 (construct 1) or NFR1/CERK6 chimeras (constructs 2-8, one construct per row, construct schematic indicated). The ratio of plants with nodules observed over total plants tested is provided. From left to right columns, the images show nodule formation as inspected in bright field, root transformation as monitored by the expression of a YFP marker gene, nodule infection by M. loti-DsRed bacteria, and Nin promoter activation as analyzed by GUS staining. The scale bars indicate 5 mm. FIG. 2C shows the level of reactive oxygen species (ROS) produced by L. japonicus wild-type (WT) and cerk6-1 mutant roots tested with different protein constructs, including NFR1 (construct 9), CERK6 (construct 13), or NFR1/CERK6 chimeras (constructs 11-16), under control of the Cerk6 promoter. The x-axis indicates the identity of the LysM receptor kinase construct, and the y-axis indicates the ratio between ROS peak values obtained after treatment with CO8 vs. flg22 elicitors, and normalized to WT values. Flg22 treatment was used as an internal control for root responsiveness to elicitors. In FIGS. 2A-2C schematic diagrams of LysM receptor kinase constructs are shown with NFR1 domains shown in white, and CERK6 domains shown in green. Chimeras were generated by exchanging the ectodomain (EC), transmembrane and juxtamembrane domains (TJ), and the kinase domain (KD). In FIG. 2A and FIG. 2C, n indicates the number of analyzed plants, dots represent values from individual plants, and different letter labels indicate significant differences between samples as determined by ANOVA with Tukey's multiple comparisons test, P<0.05. The box and whisker plots represent the interquartile range, where the middle line represents the median, and the lower and upper lines represent the first and third interquartile.

[0040] FIGS. 3A-3B show images of YFP-tagged LysM receptor kinase proteins transiently expressed in N. benthamiana (tobacco) leaves under control of the 35S promoter and 35S terminator. The plasma membrane marker AtPIP2A-mCherry was co-expressed. Schematic diagrams, at left, show the composition of the LysM receptor kinase constructs, with NFR1 domains in white and CERK6 domains in green. From left to right columns, the images show YFP, mCherry, and a merge of the two. The scale bars indicate 50 μm. FIG. 3A provides results for NFR1 (corresponding to constructs 1 and 9), NFR1 with the CERK6 TJ and KD and a K351N point mutation, (corresponding to constructs 4 and 12), CERK6 with a K351N point mutation (corresponding to constructs 5 and 13), and CERK6 with the NFR1 KD (corresponding to constructs 7 and 15). FIG. 3B provides results for NFR1 with an I78W point mutation (corresponding to construct 23), CERK6 with V79W and K351N point mutations (corresponding to construct 31), and CERK6 with NFR1 LysM1 regions II and IV and a K351N point mutation (corresponding to construct 65).

[0041] FIGS. 4A-4B show results of functional studies measuring nodulation using chimeras of the L. japonicus LysM receptor kinase proteins NFR1 and CERK6 in which the LysM1, LysM2, and LysM3 domains are swapped. FIG. 4A shows schematic diagrams of NFR1 and CERK6. From N to C terminus, the boxes represent LysM domains of the ectodomain (LysM1, LysM2 and LysM3), transmembrane and juxtamembrane domains (TJ), and the kinase domain (KD). The dotted lines and indicated amino acids (D91, C152, A226 and L325 for NFR1; and D92, C153, G226 and L325 for CERK6) specify boundaries between domains. Also indicated above the protein schematics with blue arrows are the positions of point mutations (I78W and I140W for NFR1; and V79W and I141W for CERK6). FIG. 4B shows nodule formation observed on roots of L. japonicus nfr1-1 mutants tested with different protein constructs, including NFR1 (construct 1), NFR1/CERK6 chimeras (constructs 17-22), or NFR1 with point mutations (constructs 23-24), under control of the Nfr1 promoter. The x-axis indicates the identity of the LysM receptor kinase construct, and the y-axis indicates the number of nodules formed per plant. Schematic diagrams of the LysM receptor kinase proteins are shown on the x-axis, with NFR1 domains shown in white, and CERK6 domains in green. Constructs 23 and 24 contain point mutations I78W and I140W, respectively, as indicated. n indicates the number of analyzed plants, dots represent values from individual plants, and different letters labels indicate significant differences between samples as determined by ANOVA with Tukey's multiple comparisons test, P<0.05. The box and whisker plots represent the interquartile range, where the middle line represents the median, and the lower and upper lines represent the first and third interquartile.

[0042] FIGS. 5A-5B show representative images of nodulation phenotypes of L. japonicus nfr1-1 roots expressing LysM receptor kinase constructs, including NFR1/CERK6 chimeras (constructs 17-22, and 33-26), or NFR1 with point mutations (constructs 23-24), under control of the Nfr1 promoter. As indicated in the schematic diagrams, FIG. 5A shows results for constructs 17-22. FIG. 5B shows results for constructs 23-24 and 33-36. In FIGS. 5A-5B, from the left to right columns, the images show nodule formation as inspected in bright field, root transformation as monitored by the expression of a YFP marker gene, nodule infection by M. loti-DsRed bacteria, and Nin promoter activation as analyzed by GUS staining. The ratio of plants with nodules observed is indicated for each construct.

[0043] FIGS. 6A-6B show results of functional studies measuring nodulation and ROS formation using chimeras of the L. japonicus LysM receptor kinase proteins NFR1 and CERK6 in which the LysM1, LysM2, and LysM3 domains are swapped and structural models of CERK6. FIG. 6A shows the level of ROS produced by L. japonicus wild-type (WT) and cerk6-1 mutant roots tested with different protein constructs, including CERK6 (construct 13), NFR1/CERK6 chimeras (constructs 12 and 25-30), or CERK6 with point mutations (constructs 31-32), under control of the Cerk6 promoter. The x-axis indicates the identity of the LysM receptor kinase construct, and the y-axis indicates the ratio between ROS peak values obtained after treatment with CO8 vs. flg22 elicitors, and normalized to WT values. Flg22 treatment was used as an internal control for root responsiveness to elicitors. Schematic diagrams of the LysM receptor kinase protein constructs are shown on the x-axis, with NFR1 domains shown in white, and CERK6 domains in green. Constructs 31 and 32 contain CERK6 with point mutations V79W and I141W, respectively, as indicated. n indicates the number of analyzed plants, dots represent values from individual plants, and different letters labels indicate significant differences between samples as determined by ANOVA with Tukey's multiple comparisons test, P<0.05. The box and whisker plots represent the interquartile range, where the middle line represents the median, and the lower and upper lines represent the first and third interquartile.

[0044] FIG. 6B shows a structural model of the predicted chitin (CO) binding grooves in the LysM1 (left) and LysM2 (right) domains of CERK6. The LysM1 and LysM2 structures are shown as green ribbon diagrams. Arrows indicate the location of the tryptophan (W) that was inserted to create constructs 31 and 32 at position V79W for LysM1 (construct 31), and I141W for LysM2 (construct 32). The tryptophan (W) residue is shown as a blue stick diagram, surrounded by a space-filling model shown as a grey cloud. The CO ligand is shown as a ball and stick model in red and blue.

[0045] FIGS. 7A-7C shows the LysM1 domain and results of functional studies measuring nodulation and ROS formation using chimeras of the L. japonicus LysM receptor kinase proteins NFR1 and CERK6 in which regions within the LysM1 domain are swapped. FIG. 7A shows an alignment of the specified amino acid sequences of the LysM1 domains of NFR1 (top, SEQ ID NO: 165) and CERK6 (bottom, SEQ ID NO: 166). Identical amino acids are marked in grey. Regions I, II, III, and IV are indicated above the alignment, and beta sheet (β1, β2) and alpha helix (α1, α2) secondary structures based on the CERK6 crystal structure are indicated below the alignment. FIG. 7B shows nodule formation observed on roots of L. japonicus nfr1-1 mutants tested with different protein constructs, including NFR1 (construct 1), or NFR1/CERK6 chimeras (constructs 33-36), under control of the Nfr1 promoter. The x-axis indicates the identity of the LysM receptor kinase construct, and the y-axis indicates the number of nodules formed per plant. FIG. 7C shows the level of ROS produced by L. japonicus wild-type (WT) and cerk6-1 mutant roots tested with different protein constructs, including CERK6 (construct 13), or NFR1/CERK6 chimeras (constructs 37-40), under control of the Cerk6 promoter. The x-axis indicates the identity of the LysM receptor kinase construct, and the y-axis indicates the ratio between ROS peak values obtained after treatment with CO8 vs. flg22 elicitors, and normalized to WT values. Flg22 treatment was used as an internal control for root responsiveness to elicitors. In FIGS. 7A-7B, schematic diagrams of LysM receptor kinase protein constructs are shown on the x-axis, with NFR1 domains and regions shown in white, and CERK6 domains and regions in green. n indicates number of individual biological samples, dots represent values from individual plants, and different letters labels indicate significant differences between samples as determined by ANOVA with Tukey's multiple comparisons test, P<0.05. The box and whisker plots represent the interquartile range, where the middle line represents the median, and the lower and upper lines represent the first and third interquartile.

[0046] FIGS. 8A-8D show comparisons of LysM1 domains of different LysM receptors and Nod factors of different bacterial species. FIG. 8A shows an alignment of the specified amino acid sequences of the LysM1 domains of L. japonicus NFR1 (SEQ ID NO: 165) and M. truncatula LYK3 (SEQ ID NO: 167). Identical amino acids are marked in grey. Regions II, III, and IV are indicated above the alignment, and beta sheet (β1, β2) and alpha helix (α1, α2) secondary structures based on the LYK3 crystal structure are indicated below the alignment.

[0047] FIG. 8B shows a schematic diagram showing NFR1 (top, white boxes) and LYK3 (bottom, blue boxes). From N to C terminus, the boxes represent LysM domains of the ectodomain (LysM1, LysM2 and LysM3), transmembrane and juxtamembrane domains (TJ), and the kinase domain (KD). The dotted lines and indicated amino acids (D91, G227, and L325 for NFR1; E91, G226 and L324 for LYK3) specify boundaries between the analyzed domains. FIG. 8C shows chemical structures of M. loti Nod factor V (Cb, C18:1, Me, AcFuc; top) and S. meliloti Nod factor IV (Ac, C16:2, S; bottom). FIG. 8D shows the structure of a generic Nod factor, with the locations of ten different moieties (R1 through R10) indicated. The number of N-Acetylglucosamine monomers (in square brackets) varies in number (n) between different Nod factors.

[0048] FIGS. 9A-9B show results of functional studies measuring nodulation using chimeras of the L. japonicus LysM receptor kinase protein NFR1 and the M. truncatula LysM receptor kinase protein LYK3. FIG. 9A shows nodule formation observed on roots of L. japonicus nfr1-1 mutants tested with different protein constructs, including NFR1 (construct 1), or NFR1/LYK3 chimeras (constructs 41-45), under control of the Nfr1 promoter. The x-axis indicates the identity of the LysM receptor kinase construct, and the y-axis indicates the number of nodules formed per plant. FIG. 9B shows nodule formation observed on roots of M. truncatula lyk3-1 mutant roots tested with different protein constructs, including NFR1 (construct 46), or NFR1/LYK3 chimeras (constructs 47-51), under control of the Lyk3 promoter. In FIGS. 9A-9B, the y-axis indicates the number of nodules formed per plant. Schematic diagrams of the LysM receptor kinase constructs are shown on the x-axis, with NFR1 domains and regions shown in white, and LYK3 domains and regions in blue. n indicates the number of analyzed plants, dots represent values from individual plants, and different letters labels indicate significant differences between samples as determined by ANOVA with Tukey's multiple comparisons test, P<0.05. The box and whisker plots represent the interquartile range, where the middle line represents the median, and the lower and upper lines represent the first and third interquartile.

[0049] FIGS. 10A-10D show results of functional studies measuring nodulation using chimeras of the L. japonicus LysM receptor kinase proteins NFR1 and CERK6, or L. japonicus NFR1 and the M. truncatula LysM receptor kinase protein LYK3. FIG. 10A shows nodulation phenotypes and expression of pNin-GUS for L. japonicus nfr1-1 roots transformed with the indicated constructs 41-45. FIG. 10B shows nodulation phenotypes of M. truncatula lyk3-1 roots transformed with constructs 46-51. FIG. 10C shows nodulation phenotypes and expression of pNin-GUS for L. japonicus nfr1-1 roots transformed with constructs 52-65. FIG. 10D shows nodulation phenotypes of M. truncatula lyk3-1 roots transformed with constructs 54-58. In each of FIGS. 10A-10D, the ratios indicate the number of plants with nodules out the total number of analyzed plants. The schematic diagrams at left indicate the composition of the LysM receptor kinase constructs with NFR1 domains and regions in white, CERK6 domains and regions in green, and LYK3 domains and regions in blue. The scale bars indicate 3 mm.

[0050] FIGS. 11A-11H show the purification of LysM receptor kinase ectodomain and S. meliloti Nod factor conjugates. FIGS. 11A-11E show size-exclusion chromatography (SEC) A₂₈₀ profiles of NFR1 (FIG. 11A), CERK6 (FIG. 11B), LYK3 (FIG. 11E), NFR1 with the LysM1 regions II and IV of CERK6 (FIG. 11C) and CERK6 with the LysM1 regions II and IV of NFR1 (FIG. 11D), as depicted in the schematic diagram insets. In FIGS. 11A-11E, NFR1 domains and sequences are shown in white, CERK6 domains and sequences are shown in green, and LYK3 is shown in blue. At right are coomassie-stained SDS-PAGE gels showing the purified proteins. Elution volumes (Vₑ) in ml are shown on the x-axis, and absorbance at 280 nm in milli-absorbance units (mAU) is shown on the y-axis. The inset elution volumes (Vₑ) correspond to monomeric ectodomains, with Vₑ=18.4 ml for NFR1 in FIG. 11A, Vₑ=72.2 ml for CERK6 in FIG. 11B, Vₑ=18.0 ml for NFR1 with CERK6 LysM1 regions II and IV in FIG. 11C, Vₑ=16.2 ml for CERK6 with NFR1 LysM1 regions II and IV in FIG. 11D, and Vₑ=16.3 ml for LYK3 in FIG. 11E. FIG. 11F shows an HPLC chromatogram (215 nm) of S. meliloti Nod factor IV (Ac, C16:2, S) conjugated to biotin. Time in minutes is indicated on the x-axis, and mAU is indicated on the y-axis. FIG. 11G shows a mass spectrometric in-source fragmentation analysis performed at 75 eV (m/z±0.5 accuracy) using an MSQ Plus ESI mass spectrometer from ThermoFisher. FIG. 11H shows a structure and fragmentation analysis of S. meliloti Nod factor IV conjugated to biotin, with calculated masses indicated.

[0051] FIGS. 12A-12D show biolayer interferometry (BLI) measurements of M. loti and S. meliloti Nod factors binding to LysM receptor kinase ectodomains. FIG. 12A shows BLI measurements of M. loti (left) and S. meliloti (right) Nod factors binding to LYK3 ectodomain. FIG. 12B shows BLI measurements of M. loti (left) and S. meliloti (right) Nod factors binding to NFR1 ectodomain. FIG. 12C shows BLI measurements of M. loti Nod factor binding to CERK6 ectodomain. FIG. 12D shows BLI measurements of M. loti Nod factor binding to chimeric NFR1 ectodomain with LysM1 regions II and IV from CERK6. In each of FIGS. 12A-12D, time in seconds is indicated on the x-axis, and the level of binding in nm is indicated on the y-axis. The schematic diagrams at right indicate the composition of the LysM receptor kinase ectodomains with NFR1 domains in white, CERK6 domains and regions in green, and LYK3 domains in blue.

[0052] FIGS. 13A-13E show ribbon diagrams of LysM receptor kinase structures. FIG. 13A shows the M. truncatula LYK3 ectodomain with the three LysM domains labeled, with LysM1 in blue, LysM2 in light blue, and LysM3 in teal. Secondary structures (i. e., alpha helices and beta sheets) within the LysM domains are also labeled: LysM1 secondary structures=α1, α2, β1, and β2; LysM2 secondary structures=α3, α4, β3, and β4; and LysM2 secondary structures=α5, α6, β5, and β6. Glycosylations are shown as grey stick diagrams. The three conserved disulfide bridges are indicated in black, and labeled with arrows and the residue numbers (C29-C154, C90-C152, and C25-C92). The N- and C-termini of the ectodomain are also labeled. FIG. 13B shows a structural superposition of LYK3 (blue) and CERK6 (PDB: 5LS2; green). The three LysM domains are labeled, with LYK3 LysM1 in blue, LYK3 LysM2 in light blue, and LYK3 LysM3 in teal. The N- and C-termini of the ectodomains are also labeled. A dotted line box highlights the region of the LysM1 domain that possesses structural differences between LYK3 and CERK6. FIG. 13C shows a close-up of the LysM1 domain structural superposition of LYK3 (blue) and CERK6 (green), showing the structural differences between LYK3 (blue) and CERK6 (green). The LysM1 secondary structures α1, α2, β1, and β2 are labeled. The position of one region of the LysM1 backbone shows a distance of about 11 Å between the CERK6 and LYK3 structures, as indicated. FIG. 13D shows a superposition of chitotetraose (“CO ligand”) from the Arabidopsis thaliana CERK1 crystal structure (PDB: 4EBZ) onto LysM1 from CERK6. CERK6 is shown in green, and the CO ligand is shown as a ball and stick model in red and blue. LysM1 alpha helices α1 and α2, and regions II and IV are indicated. FIG. 13E shows a superposition of chitotetraose (“Nod factor ligand”) from the A. thaliana CERK1 crystal structure (PDB: 4EBZ) onto LysM1 from LYK3. LysM1 alpha helices α1 and α2, regions II and IV, and the position of the P87S mutation in M. truncatula lyk3-3 and L77P mutation in Pisum sativum SYM37 (RisNod4) mutants are indicated.

[0053] FIGS. 14A-14E show alignments and structural models of NFR1-type LysM Nod factor receptor kinase ectodomains. FIGS. 14A-14C show an amino acid sequence alignment of NFR1-type LysM Nod factor receptor ectodomain sequences from Medicago truncatula (Q6UD73.1|LYK3 (SEQ ID NO: 168)), Phaseolus vulgaris (XP_007141617.1 (SEQ ID NO: 169)), Arachis hypogaea (XP_029150476.1 (SEQ ID NO: 170) and XP_029144024.1 (SEQ ID NO: 171)), Cajanus cajan (XP_020213700.2 (SEQ ID NO: 172)), Cicer arietinum (XP_004491136.1 (SEQ ID NO: 173)), Abrus precatorius (XP_027332267.1 (SEQ ID NO: 174)), Glycine max (XP_006575588.1 (SEQ ID NO: 175) and XP_006595821.2 (SEQ ID NO: 176)), Lupinus angustifolius (XP_019434083.1 (SEQ ID NO: 177) and XP_019461629.1 (SEQ ID NO: 178)), Lotus japonicus (CAE02590.1|NFR1 (SEQ ID NO: 179)), Pisum sativum (ARX80051.1|Sym37 (SEQ ID NO: 180)), Vigna angularis (KOM46748.1 (SEQ ID NO: 181)), Vigna radiata var. radiata (XP_014504127.1 (SEQ ID NO: 182)), Vigna unguiculata (XP_027939826.1 (SEQ ID NO: 183)), Arachis duranensis (XP_020982945.1 (SEQ ID NO: 184)), Arachis ipaensis (XP_020962820.1 (SEQ ID NO: 185)), Chamaecrista fasciculata (2879S20281 (SEQ ID NO: 186)), Mimosa pudica (Scaffold15743 (SEQ ID NO: 187)), Lupinus albus (Chr04g0249871 (SEQ ID NO: 188)), Spatholobus suberectus (TKY57029.1 (SEQ ID NO: 189)), and Prosopis alba (XP_028753017.1 (SEQ ID NO: 190)). LysM1, LysM2 and LysM3 domains are indicated with labels above the alignment, and LysM1 domain regions II, III, and IV are indicated with labels above the alignment and dashed boxes. Conserved residues are highlighted blue. The conservation score of each residue is shown below the alignment as a histogram. FIG. 14A shows the alignment of the N-terminal portion of the NFR1-type LysM Nod factor receptor kinase ectodomains. FIG. 14B shows the alignment of the central portion of the NFR1-type LysM Nod factor receptor kinase ectodomains. FIG. 14C shows the alignment of the C-terminal portion of the NFR1-type LysM Nod factor receptor kinase ectodomains. FIG. 14D shows a model of the conservation of NFR1-type LysM Nod factor receptors mapped onto the structure of LYK3. The N-terminus (N), C-terminus (C), LysM domains (LysM1, LysM2, and LysM3), and LysM1 regions II, III and IV are labeled. LysM1 regions II, III and IV are highlighted in blue. Amino acid variations identified in the LYKX (LykX) protein from different cultivars of P. sativum (pea) known to correlate with ability to nodulate in the presence of R. leguminosarum producing acetylated Nod factors are also indicated on the model, including QN/RY, and RA/PA/RD. FIG. 14E shows a model of the conservation of NFR1-type LysM Nod factor receptor kinases mapped onto the structure of LYK3 LysM1. The N- and C-termini are labeled, and regions II, III and IV are labeled and highlighted in blue. The alignment logos of regions II, III and IV are shown in boxes. In FIGS. 14D-14E, the thickness of the backbone atoms signifies relative conservation, with a thin backbone indicating conserved regions, and a thick backbone indicating variable regions.

[0054] FIGS. 15A-15E show alignments and structural models of CERK6-type LysM chitin receptor kinase ectodomains. FIGS. 15A-15C show an amino acid sequence alignment of CERK6-type LysM chitin receptor ectodomains with sequences from Lotus japonicus (BAI79273.1|CERK6 (SEQ ID NO: 191)), Phaseolus vulgaris (XP_007146026.1 (SEQ ID NO: 192)), Arachis ipaensis (XP_016196976.1 (SEQ ID NO: 193)), Arachis duranensis (XP_015958400.1 (SEQ ID NO: 194)), Cajanus cajan (XP_020220445.1 (SEQ ID NO: 195)), Cicer arietinum (XP_004502028.1 (SEQ ID NO: 196)), Abrus precatorius (XP_027343427.1 (SEQ ID NO: 197)), Medicago truncatula (XP_003601376.2|LYK9 (SEQ ID NO: 198)), Glycine max (XP_003555584.1 (SEQ ID NO: 199) and XP_003518454.1 (SEQ ID NO: 200)), Lupinus angustifolius (XP_019425563.1 (SEQ ID NO: 201) and XP_019455825.1 (SEQ ID NO: 202)), Vigna angularis (XP_017436810.1 (SEQ ID NO: 203)), Vigna radiata (XP_014509761.1 (SEQ ID NO: 204)), Vigna unguiculata (XP_027932400.1 (SEQ ID NO: 205)), Arachis hypogaea (XP_025693415.1 (SEQ ID NO: 206)), Mimosa pudica (Scaffold8584 (SEQ ID NO: 207)), Chamaecrista fasciculata (QANZ01053660 (SEQ ID NO: 208)), Lupinus albus (Chr04g0263521 (SEQ ID NO: 209)), Pisum sativum (LYK9 (SEQ ID NO: 210)), Arachis hypogaea (XP_025645378.1 (SEQ ID NO: 211)), Spatholobus suberectus (TKY72192.1 (SEQ ID NO: 212)), and Prosopis alba (XP_028758101.1 (SEQ ID NO: 213)). LysM1, LysM2 and LysM3 domains are indicated with labels above the alignment, and LysM1 domain regions II and IV are indicated with labels above the alignment and dashed boxes. The conservation score of each residue is shown below the alignment as a histogram. FIG. 15A shows the alignment of the N-terminal portion of the CERK6-type LysM chitin receptor kinase ectodomains. FIG. 15B shows the alignment of the central portion of the CERK6-type LysM chitin receptor kinase ectodomains. FIG. 15C shows the alignment of the C-terminal portion of the CERK6-type LysM chitin receptor kinase ectodomains. FIG. 15D shows a model of the conservation of CERK6-type LysM chitin receptors mapped onto the structure of CERK6. The N-terminus (N), C-terminus (C), LysM domains (LysM1, LysM2, and LysM3), and LysM1 regions II, III and IV are labeled. LysM1 regions II and IV are highlighted in green. FIG. 15E shows a model of the conservation of CERK6-type LysM chitin receptors mapped onto the structure of CERK6 LysM1. Regions II and IV are highlighted in green, and the CO ligand is shown as a ball and stick model in red and blue. The alignment logos of the chitooligosaccharide (CO) signature motifs in regions II and IV are shown in boxes. In FIGS. 15D-15E, the thickness of the backbone atoms signifies relative conservation, with a thin backbone indicating conserved regions, and a thick backbone indicating variable regions.

[0055] FIGS. 16A-16C show results of functional studies measuring nodulation using chimeras of the L. japonicus LysM receptor kinase proteins NFR1 and CERK6, or L. japonicus NFR1 and the M. truncatula LysM receptor kinase protein LYK3. FIG. 16A shows nodule formation observed on roots of L. japonicus nfr1-1 mutants tested with different protein constructs, including NFR1 (construct 1), NFR1/LYK3 chimeras (constructs 52 and 53), or NFR1/CERK6 chimeras (constructs 59-65), under control of the Nfr1 promoter. FIG. 16B shows nodule formation observed on roots of M. truncatula lyk3-1 mutants tested with different protein constructs, including LYK3 (construct 47), or NFR1/LYK3 chimeras (constructs 54-58), under control of the Lyk3 promoter. In FIGS. 16A-16B, the x-axis indicates the identity of the LysM receptor kinase construct, and the y-axis indicates the number of nodules formed per plant. Schematic diagrams of the LysM receptor kinase protein constructs are shown on the x-axis, with NFR1 domains and regions shown in white, CERK6 domains and regions shown in green, and LYK3 domains and regions shown in blue. n indicates the number of analyzed plants, and the different letters indicate significant difference among samples as determined by ANOVA with Tukey's multiple comparisons test, P<0.05. FIG. 16C shows BLI measurements of M. loti Nod factor binding to chimeric ectodomains of CERK6 with LysM1 regions II and IV from NFR1. Time in seconds is on the x-axis, and binding in nm is on the y-axis. At right, a schematic diagram shows the ectodomain construct with CERK6 domains in green and NFR1 regions in white.

[0056] FIGS. 17A-17G show comparisons of LysM receptor kinase LysM1 domain structures as ribbon diagrams. FIG. 17A shows the structure of the LysM1 domain of A. thaliana CERK1 (AtCERK1), with motifs within regions II (amino acid residues GTTLSV (SEQ ID NO: 59)) and IV (amino acid residues KDRIQM (SEQ ID NO: 69)) indicated, and in yellow. FIG. 17B shows a superposition of the structures of the LysM1 domain of A. thaliana CERK1 (AtCERK1) and L. japonicus CERK6 (LjCERK6) with motifs within regions II and IV indicated. A. thaliana motifs within regions II and IV are in yellow, and L. japonicus motifs within regions II and IV are in red. For A. thaliana CERK1, the amino acid residues of motifs within regions II and IV are as shown in FIG. 17A. For L. japonicus CERK6, the region II motif is amino acid residues GSNLTY (SEQ ID NO: 14), and the region IV motif is amino acid residues KDSVQA (SEQ ID NO: 40). FIG. 17C shows the structure of the LysM1 domain of Hordeum vulgare (barley) RLK4 (HvRLK4), with motifs within regions II (amino acid residues NQNVTY (SEQ ID NO: 62)) and IV (amino acid residues NNLDYVV (SEQ ID NO: 142)) indicated and in green. FIG. 17D shows the structure of the LysM1 domain of H. vulgare RLK5 (HvRLK5), with motifs within regions II (amino acid residues TPNVNV (SEQ ID NO: 143)) and IV (amino acid residues LDYVAA (SEQ ID NO: 70)) indicated and in green. FIG. 17E shows the structure of the LysM1 domain of a Marchantia polymorpha homolog of CERK1 and NFR1 (Marpol Mapoly0080s0051.1), with motifs within regions II (amino acid residues DDTLL (SEQ ID NO: 67) and IV (amino acid residues PDSVEA (SEQ ID NO: 77)) indicated and in purple. FIG. 17F shows the structure of the LysM1 domain of a Prunus persica homolog of CERK1 and NFR1 (Prupe.3G213100), with motifs within regions II (amino acid residues GSNLTL (SEQ ID NO: 54)) and IV (amino acid residues KDSVLA (SEQ ID NO: 57)) indicated and in blue. FIG. 17G shows the structure of the LysM1 domain of a Solanum lycopersicum homolog of CERK1 and NFR1 (Solyc07g049180), with motifs within regions II (amino acid residues RGSNLT (SEQ ID NO: 341)) and IV (amino acid residues QDSVIA (SEQ ID NO: 56)) indicated and in purple. In FIGS. 17A-17G, chitin (C04) molecules are shown as stick models in orange, blue, and red.

[0057] FIGS. 18A-18J show structural and experimental results characterizing important residues in the LysM2 domain for Nod factor perception. FIG. 18A shows the structure of the NFP receptor ectodomain (NFP-ECD) with the three LysM domains labeled (LysM1, LysM2, and LysM3). Secondary structures (beta sheet and alpha helix) within the LysM domains are also labeled: LysM1 secondary structures=α1, α2, β1, and β2; LysM2 secondary structures=α3, α4, β3, and β4; and LysM3 secondary structures=α5, α6, β5, and β6. Glycosylations (di-GlcNAc cores are shown (projecting from α1 at upper; additional cores visible at center adjacent to β2 and β1 as well as at bottom left behind α4), and disulfide bridges are indicated with arrows and labeled with the residue numbers (C47-C166; C39-C104; and C102-C164). FIG. 18B shows M. truncatula NFP shaded with electrostatic surface potential with molecular docking of chitin (C04; designated as “Ligand”). The hydrophobic patch is circled by a dashed black line, and the locations of important residues L147 and L154 are shown using arrows. The position of the Nod factor fatty-acid is depicted with a dashed orange line. FIG. 18C shows BLI binding curves for WT M. truncatula NFP ectodomain binding to S. meliloti LCO-IV. FIG. 18D shows BLI binding curves for M. truncatula NFP ectodomain with the double mutation L147D L154D binding to S. meliloti LCO-IV. For FIGS. 18C-18D, seven 2-fold dilution series of analyte (1.56-100 μM) were used for each experiment; and experimental binding curves are represented in solid lines, fitting curves in dashed lines. FIG. 18E shows BLI binding curves for A. thaliana CERK1 binding to chitopentaose (chitin; CO5). FIG. 18F shows BLI binding curves for A. thaliana CERK1 binding to chitooctaose (chitin; CO8). For FIGS. 18E-18F, seven 2-fold dilution series of analyte (1.56-100 μM) were used for each experiment; experimental binding curves are represented in solid lines, fitting curves in dashed lines; goodness of fit is described by the global fit R² on the mean value of each point; number of replicates performed using independent protein preparations (n) indicated; and kinetic parameters (kₒₙ and k_{off}) are shown. FIG. 18G shows a schematic of the M. truncatula NFP receptor with LysM1 domain, LysM2 domain, LysM3 domain, stem, transmembrane (TM) domain, and kinase domains labeled, and the location of the hydrophobic patch in the LysM2 domain indicated by a grey bar. Numbers below the schematic provide the corresponding amino acid residues, and the locations of the CxC motifs flanking the LysM domains are shown. FIG. 18H shows the general schematic of the construct used for M. truncatula nfp mutant complementation experiments. Designations are as follows: T-DNA left border=LB, T-DNA right border=RB, nuclear localized triple yellow fluorescent protein=tYFPnls, buffer sequence=buffer, constitutive ubiquitin promoter=pUbi, Nfr1 promoter=pNfr1, Cerk6 promoter=pCerk6. The arrows indicate the directions of gene transcription. FIGS. 18I-18J show complementation assays of M. truncatula nfp mutants. FIG. 18I shows complementation tested by inoculation with S. meliloti strain 2011. FIG. 18J shows complementation tested by inoculation with S. medicae. Columns represent the mean nodule numbers, while circles represent the number of nodule counts on individual plants. Empty circles=M. truncatula A17 wild type; filled circles=M. truncatula nfp mutant; EVC=empty vector control; and WT=wild type. Error bars show the SEM. Different letters indicate significant differences between the samples (ANOVA, Tukey, P<0.05).

[0058] FIGS. 19A-19F show L. japonicus LYS11 ectodomain model and crystal structure, modified L. japonicus LYS11 ectodomains, and testing of modified L. japonicus LYS11 ectodomains. FIG. 19A shows a comparison of the L. japonicus LYS11 ectodomain model (LYS11—model; left) with the crystal structure of the L. japonicus LYS11 ectodomain (LYS11—crystal structure; right) shaded with electrostatic surface potential. The molecular docking of a CO4 ligand (orange stick diagram) is shown, and the hydrophobic patch is circled by a dashed black line. FIG. 19B shows schematics of modified L. japonicus LYS11 ectodomains (L. japonicus LYS11/NFR5 chimeras) used for testing. The top schematic shows an ectodomain with entirely L. japonicus LYS11 domains (black), the middle schematic shows an ectodomain where the LysM2 domain from L. japonicus LYS11 was replaced with the LysM2 domain from L. japonicus NFR5 (grey), and the bottom schematic shows an ectodomain where key residues from L. japonicus LYS11 were replaced with key residues from L. japonicus NFR5 (grey) (N-terminus=N′; LysM1=M1; LysM2=M2; LysM3=M3; 6×HIS tag used for purification=6×HIS; C-terminus=C′). FIG. 19C shows the results of binding assays with the ectodomain with entirely L. japonicus jLYS11 components (ectodomain schematic shown at top with L. japonicus jLYS11 domains in black; results of binding assays shown at bottom). The Kd is shown in the title of each graph (CO5 (Kd=11.4 M. loti LCO (Kd=38.6 and S. meliloti LCO (weak binding)). FIG. 19D shows the results of binding assays with the ectodomain where LysM2 from L. japonicus LYS11 was replaced with LysM2 from L. japonicus NFR5 (ectodomain schematic shown at top with L. japonicus LYS11 domains in black and L. japonicus NFR5 domains in grey; results of binding assays shown at bottom). FIG. 19E shows the results of binding assays with the ectodomain where key residues from L. japonicus LYS11 were replaced with key residues from L. japonicus NFR5 (ectodomain schematic shown at top with L. japonicus LYS11 domains in black and L. japonicus NFR5 residues in grey; results of binding assays shown at bottom). For FIGS. 19C-19E, binding in nm is shown on the y-axes, time in seconds (s) is shown on the x-axes, and the tested molecules are shown in the titles of the graphs (CO5, M. loti LCO, and S. meliloti LCO). FIG. 19F shows complementation of L. japonicus nfr5 (Ljnfr5) mutants with L. japonicus NFR5/LYS11 chimeras depicted at the bottom of the graph. Complementation was assayed by counting nodules formed per plant, which is shown at the top of FIG. 19F. Black dots represent individual plants, columns indicate the mean values, and error bars show the SEM. Different letters indicate significant difference among the samples (ANOVA, Tukey, P<0.01). The schematics of the individual chimeric ectodomains tested are shown at the bottom of FIG. 19F, with light grey indicating L. japonicus NFR5 domains, dark grey indicating L. japonicus LYS11 domains, and empty vector denoted by a label (LysM1, LysM2 and LysM3 are shown as boxes; transmembrane domain is shown as a wavy shape; kinase domain is shown as an oval shape). Below the receptor schematics, the number of plants (Plant), the number of plants without nodules (neg), the number of plants with nodules (pos), and the frequency (freq) of plants forming nodules when transformed with the depicted vector is provided.

[0059] FIGS. 20A-20D show models of chitin and Nod factor perception, and structural alignment of the ectodomains of M. truncatula NFP, A. thaliana CERK1 and L. japonicus CERK6. FIG. 20A shows a model of chitin perception by chitin receptors (e.g., A. thaliana CERK1). FIG. 20B shows a model of Nod factor perception by Nod factor receptors (e.g., M. truncatula NFP). FIG. 20C shows a model of Nod factor perception by hydrophobic patch mutant Nod factor receptors (e.g., M. truncatula NFP L147D L154D). FIG. 20D shows structural alignment of the ectodomains of M. truncatula NFP (Medicago NFP), A. thaliana CERK1 (Arabidopsis CERK1) and L. japonicus CERK6 (Lotus CERK6). Molecular fits (RMSD values) based on structural superposition of the ectodomains are shown in A (Angstrom). The structures (above) are shaded according to the schematic representation of the ectodomain (below). The conserved disulfide connectivity pattern between M. truncatula NFP, A. thaliana CERK1 and L. japonicus CERK6 is highlighted.

[0060] FIGS. 21A-21B show structural modelling of the H. vulgare LysM receptor RLK2 ectodomain (residues 37-247) containing LysM1, LysM2, and LysM3 domains. FIG. 21A shows the PyMol visualization of the LysM1, LysM2, and LysM3 domains of the H. vulgare LysM receptor RLK2 ectodomain (residues 37-247) model with the LysM1 domain labeled and in blue, the LysM2 domain labeled and in green, and the LysM3 domain labeled and in light grey. FIG. 21B shows the electrostatic surface potential of the model with chitin modeled in the binding groove.

### DETAILED DESCRIPTION

[0061] The following description sets forth exemplary methods, parameters, and the like. It should be recognized, however, that such description is not intended as a limitation on the scope of the present disclosure but is instead provided as a description of exemplary embodiments.

### Modified Plant LysM Receptors

[0062] An aspect of the present disclosure includes a modified plant LysM receptor polypeptide including a LysM1 domain including a first motif and a second motif, wherein the first motif and/or the second motif are modified as compared to the amino acid sequences of the corresponding wild-type plant LysM receptor polypeptide. An additional embodiment of this aspect includes the first motif corresponding to amino acids 42-48 SEQ ID NO: 162 when the receptor polypeptide amino acid sequence is aligned to SEQ ID NO: 162 and the second motif corresponding to amino acids 75-80 of SEQ ID NO: 162 when the receptor polypeptide amino acid sequence is aligned to SEQ ID NO: 162. A further embodiment of this aspect includes the first motif corresponding to amino acids 44-49 of SEQ ID NO: 164 when the receptor polypeptide amino acid sequence is aligned to SEQ ID NO: 164 and the second motif corresponding to amino acids 76-81 of SEQ ID NO: 164 when the receptor polypeptide amino acid sequence is aligned to SEQ ID NO: 164. In yet another embodiment of this aspect, which may be combined with any of the preceding embodiments, the first motif is modified by substituting at least one, at least two, or at least three amino acid residues in the first motif with corresponding amino acid residues that are different in a third motif, and/or the second motif is modified by substituting at least one, at least two, or at least three amino acid residues in the second motif with corresponding amino acid residues that are different in a fourth motif. In still another embodiment of this aspect, which may be combined with any of the preceding embodiments, the first motif is modified by substituting the first motif with a third motif, and/or wherein the second motif is modified by substituting the second motif with a fourth motif. An additional embodiment of this aspect, which may be combined with any of the preceding embodiments that has the third motif and the fourth motif, includes the third motif and the fourth motif having different affinities, selectivities, and/or specificities for oligosaccharides than the first motif and the second motif. Oligosaccharides recognized by the first motif and the second motif may be chitins (chitooligosaccharides (COs)) or Nod factors (lipochitooligosaccharides (LCOs)), and oligosaccharides recognized by the third motif and the fourth motif may be Nod factors (lipochitooligosaccharides (LCOs)). A further embodiment of this aspect includes the third motif and the fourth motif have different affinities for oligosaccharides than the first motif and the second motif. Yet another embodiment of this aspect includes the third motif and the fourth motif having different selectivities for oligosaccharides than the first motif and the second motif. Still another embodiment of this aspect includes the third motif and the fourth motif having different specificities for oligosaccharides than the first motif and the second motif. In a further embodiment of this aspect, which may be combined with any of the preceding embodiments that has the third motif and the fourth motif, the third motif and the fourth motif are from a second plant LysM receptor polypeptide having the different affinity, selectivity and/or specificity for oligosaccharides and the third motif corresponds to amino acids 42-48 of SEQ ID NO: 162 when the second plant LysM polypeptide amino acid sequence is aligned to SEQ ID NO: 162 and the fourth motif corresponds to amino acids 75-80 of SEQ ID NO: 162 when the second plant LysM polypeptide amino acid sequence is aligned to SEQ ID NO: 162. The second plant LysM receptor may be a LysM Nod factor receptor, such as a LysM high affinity Nod factor receptor. In an additional embodiment of this aspect, which may be combined with any of the preceding embodiments that has the third motif and the fourth motif, the third motif and the fourth motif are from a second plant LysM receptor polypeptide having the different affinity, selectivity and/or specificity for oligosaccharides and the third motif corresponds to amino acids 44-49 of SEQ ID NO: 164 when the second plant LysM polypeptide amino acid sequence is aligned to SEQ ID NO: 164 and the fourth motif corresponds to amino acids 76-81 of SEQ ID NO: 164 when the second plant LysM polypeptide amino acid sequence is aligned to SEQ ID NO: 164. In yet another embodiment of this aspect, which may be combined with any of the preceding embodiments that has the third motif and the fourth motif being from a second plant LysM receptor polypeptide having the different affinity, selectivity and/or specificity for oligosaccharides, at least one amino acid residue in flanking regions of the receptor polypeptide is different than the corresponding amino acid in the flanking regions of the second plant LysM receptor polypeptide and the flanking regions correspond to amino acids 41, 49-52, 73-74, and 81 of SEQ ID NO: 162, amino acids 47-53, 66-74, and 81-82 of SEQ ID NO: 163, and/or amino acids 43, 50-53, 74-75, and 82 of SEQ ID NO: 164.

[0063] In an additional embodiment of this aspect, which may be combined with any of the preceding embodiments, the first motif includes SEQ ID NO: 1, SEQ ID NO: 2, SEQ ID NO: 3, SEQ ID NO: 4, SEQ ID NO: 5, SEQ ID NO: 6, SEQ ID NO: 7, SEQ ID NO: 8, SEQ ID NO: 9, SEQ ID NO: 10, SEQ ID NO: 11, SEQ ID NO: 12, SEQ ID NO: 13, SEQ ID NO: 14, SEQ ID NO: 15, SEQ ID NO: 16, SEQ ID NO: 17, SEQ ID NO: 18, SEQ ID NO: 19, SEQ ID NO: 20, SEQ ID NO: 21, SEQ ID NO: 22, SEQ ID NO: 23, SEQ ID NO: 24, SEQ ID NO: 25, SEQ ID NO: 26, SEQ ID NO: 53, SEQ ID NO: 54, SEQ ID NO: 55, SEQ ID NO: 59, SEQ ID NO: 60, SEQ ID NO: 61, SEQ ID NO: 62, SEQ ID NO: 63, SEQ ID NO: 64, SEQ ID NO: 65, SEQ ID NO: 66, SEQ ID NO: 67, SEQ ID NO: 68, SEQ ID NO: 79, SEQ ID NO: 80, SEQ ID NO: 81, SEQ ID NO: 82, SEQ ID NO: 83, SEQ ID NO: 84, SEQ ID NO: 85, SEQ ID NO: 86, SEQ ID NO: 87, SEQ ID NO: 88, SEQ ID NO: 89, SEQ ID NO: 90, SEQ ID NO: 91, SEQ ID NO: 92, SEQ ID NO: 93, SEQ ID NO: 94, SEQ ID NO: 95, SEQ ID NO: 96, SEQ ID NO: 97, SEQ ID NO: 98, SEQ ID NO: 99, SEQ ID NO: 143, or SEQ ID NO: 341. In a further embodiment of this aspect, which may be combined with any of the preceding embodiments, the first motif includes SEQ ID NO: 27, SEQ ID NO: 28, SEQ ID NO: 29, SEQ ID NO: 30, SEQ ID NO: 31, SEQ ID NO: 32, SEQ ID NO: 33, SEQ ID NO: 34, SEQ ID NO: 35, SEQ ID NO: 36, SEQ ID NO: 37, SEQ ID NO: 38, SEQ ID NO: 39, SEQ ID NO: 40, SEQ ID NO: 41, SEQ ID NO: 42, SEQ ID NO: 43, SEQ ID NO: 44, SEQ ID NO: 45, SEQ ID NO: 46, SEQ ID NO: 47, SEQ ID NO: 48, SEQ ID NO: 49, SEQ ID NO: 50, SEQ ID NO: 51, SEQ ID NO: 52, SEQ ID NO: 56, SEQ ID NO: 57, SEQ ID NO: 58, SEQ ID NO: 69, SEQ ID NO: 70, SEQ ID NO: 71, SEQ ID NO: 72, SEQ ID NO: 73, SEQ ID NO: 74, SEQ ID NO: 75, SEQ ID NO: 76, SEQ ID NO: 77, SEQ ID NO: 78, SEQ ID NO: 121, SEQ ID NO: 122, SEQ ID NO: 123, SEQ ID NO: 124, SEQ ID NO: 125, SEQ ID NO: 126, SEQ ID NO: 127, SEQ ID NO: 128, SEQ ID NO: 129, SEQ ID NO: 130, SEQ ID NO: 131, SEQ ID NO: 132, SEQ ID NO: 133, SEQ ID NO: 134, SEQ ID NO: 135, SEQ ID NO: 136, SEQ ID NO: 137, SEQ ID NO: 138, SEQ ID NO: 139, SEQ ID NO: 140, SEQ ID NO: 141, or SEQ ID NO: 142. In yet another embodiment of this aspect, the third motif includes SEQ ID NO: 1, SEQ ID NO: 2, SEQ ID NO: 3, SEQ ID NO: 4, SEQ ID NO: 5, SEQ ID NO: 6, SEQ ID NO: 7, SEQ ID NO: 8, SEQ ID NO: 9, SEQ ID NO: 10, SEQ ID NO: 11, SEQ ID NO: 12, SEQ ID NO: 13, SEQ ID NO: 14, SEQ ID NO: 15, SEQ ID NO: 16, SEQ ID NO: 17, SEQ ID NO: 18, SEQ ID NO: 19, SEQ ID NO: 20, SEQ ID NO: 21, SEQ ID NO: 22, SEQ ID NO: 23, SEQ ID NO: 24, SEQ ID NO: 25, SEQ ID NO: 26, SEQ ID NO: 53, SEQ ID NO: 54, SEQ ID NO: 55, SEQ ID NO: 59, SEQ ID NO: 60, SEQ ID NO: 61, SEQ ID NO: 62, SEQ ID NO: 63, SEQ ID NO: 64, SEQ ID NO: 65, SEQ ID NO: 66, SEQ ID NO: 67, SEQ ID NO: 68, SEQ ID NO: 79, SEQ ID NO: 80, SEQ ID NO: 81, SEQ ID NO: 82, SEQ ID NO: 83, SEQ ID NO: 84, SEQ ID NO: 85, SEQ ID NO: 86, SEQ ID NO: 87, SEQ ID NO: 88, SEQ ID NO: 89, SEQ ID NO: 90, SEQ ID NO: 91, SEQ ID NO: 92, SEQ ID NO: 93, SEQ ID NO: 94, SEQ ID NO: 95, SEQ ID NO: 96, SEQ ID NO: 97, SEQ ID NO: 98, SEQ ID NO: 99, SEQ ID NO: 143, or SEQ ID NO: 341, and the first motif and the third motif are different. In still another embodiment of this aspect, the fourth motif includes SEQ ID NO: 27, SEQ ID NO: 28, SEQ ID NO: 29, SEQ ID NO: 30, SEQ ID NO: 31, SEQ ID NO: 32, SEQ ID NO: 33, SEQ ID NO: 34, SEQ ID NO: 35, SEQ ID NO: 36, SEQ ID NO: 37, SEQ ID NO: 38, SEQ ID NO: 39, SEQ ID NO: 40, SEQ ID NO: 41, SEQ ID NO: 42, SEQ ID NO: 43, SEQ ID NO: 44, SEQ ID NO: 45, SEQ ID NO: 46, SEQ ID NO: 47, SEQ ID NO: 48, SEQ ID NO: 49, SEQ ID NO: 50, SEQ ID NO: 51, SEQ ID NO: 52, SEQ ID NO: 56, SEQ ID NO: 57, SEQ ID NO: 58, SEQ ID NO: 69, SEQ ID NO: 70, SEQ ID NO: 71, SEQ ID NO: 72, SEQ ID NO: 73, SEQ ID NO: 74, SEQ ID NO: 75, SEQ ID NO: 76, SEQ ID NO: 77, SEQ ID NO: 78, SEQ ID NO: 121, SEQ ID NO: 122, SEQ ID NO: 123, SEQ ID NO: 124, SEQ ID NO: 125, SEQ ID NO: 126, SEQ ID NO: 127, SEQ ID NO: 128, SEQ ID NO: 129, SEQ ID NO: 130, SEQ ID NO: 131, SEQ ID NO: 132, SEQ ID NO: 133, SEQ ID NO: 134, SEQ ID NO: 135, SEQ ID NO: 136, SEQ ID NO: 137, SEQ ID NO: 138, SEQ ID NO: 139, SEQ ID NO: 140, SEQ ID NO: 141, or SEQ ID NO: 142, and the second motif and the fourth motif are different.

[0064] Yet another embodiment of this aspect, which may be combined with any of the preceding embodiments, further includes a fifth motif in the LysM1 domain, wherein the fifth motif is modified. An additional embodiment of this aspect includes the fifth motif corresponding to amino acids 56-65 of SEQ ID NO: 162 when the receptor polypeptide amino acid sequence is aligned to SEQ ID NO: 162. In still another embodiment of this aspect, which may be combined with any of the preceding embodiments that has a fifth motif, the fifth motif is modified by substituting at least one, at least two, or at least three amino acid residues in the fifth motif with corresponding amino acid residues that are different in a sixth motif. In yet another embodiment of this aspect, which may be combined with any of the preceding embodiments that has a fifth motif, the fifth motif is substituted with a sixth motif. A further embodiment of this aspect, which may be combined with any of the preceding embodiments that has a sixth motif, includes the sixth motif being from a second plant LysM receptor polypeptide having the different specificity for oligosaccharides and the sixth motif corresponding to amino acids 56-65 of SEQ ID NO: 162 when the second plant LysM polypeptide amino acid sequence is aligned to SEQ ID NO: 162. Oligosaccharides recognized by the fifth motif and sixth motif may be Nod factors (lipochitooligosaccharides (LCOs)). In still another embodiment of this aspect, which may be combined with any of the preceding embodiments that has a fifth motif, the fifth motif includes SEQ ID NO: 100, SEQ ID NO: 101, SEQ ID NO: 102, SEQ ID NO: 103, SEQ ID NO: 104, SEQ ID NO: 105, SEQ ID NO: 106, SEQ ID NO: 107, SEQ ID NO: 108, SEQ ID NO: 109, SEQ ID NO: 110, SEQ ID NO: 111, SEQ ID NO: 112, SEQ ID NO: 113, SEQ ID NO: 114, SEQ ID NO: 115, SEQ ID NO: 116, SEQ ID NO: 117, SEQ ID NO: 118, SEQ ID NO: 119, or SEQ ID NO: 120. In yet another embodiment of this aspect, which may be combined with any of the preceding embodiments that has a sixth motif, the sixth motif includes SEQ ID NO: 100, SEQ ID NO: 101, SEQ ID NO: 102, SEQ ID NO: 103, SEQ ID NO: 104, SEQ ID NO: 105, SEQ ID NO: 106, SEQ ID NO: 107, SEQ ID NO: 108, SEQ ID NO: 109, SEQ ID NO: 110, SEQ ID NO: 111, SEQ ID NO: 112, SEQ ID NO: 113, SEQ ID NO: 114, SEQ ID NO: 115, SEQ ID NO: 116, SEQ ID NO: 117, SEQ ID NO: 118, SEQ ID NO: 119, or SEQ ID NO: 120, and the fifth motif and the sixth motif are different.

[0065] Still another embodiment of this aspect, which may be combined with any of the preceding embodiments, includes the modified receptor polypeptide binding one or more Nod factors (lipochitooligosaccharides (LCOs)) produced by nitrogen-fixing bacteria or by mycorrhizal fungi. An additional embodiment of this aspect, includes the one or more Nod factors being produced by nitrogen-fixing bacteria selected from the group of Mesorhizobium loti, Mesorhizobium huakuii, Mesorhizobium mediterraneum, Mesorhizobium ciceri, Mesorhizobium spp., Rhizobium mongolense, Rhizobium tropici, Rhizobium etli phaseoli, Rhizobium giardinii, Rhizobium leguminosarum optionally R. leguminosarum trifolii, R. leguminosarum viciae, and R. leguminosarum phaseoli, Burkholderiales optionally symbionts of Mimosa, Sinorhizobium meliloti, Sinorhizobium medicae, Sinorhizobium fredii, Sinorhizobium NGR234, Azorhizobium caulinodans, Bradyrhizobium japonicum, Bradyrhizobium elkanii, Bradyrhizobium liaonginense, Frankia spp., or any combination thereof, or by mycorrhizal fungi selected from the group of Acaulosporaceae spp., Diversisporaceae spp., Gigasporaceae spp., Pacisporaceae spp., Funneliformis spp., Glomus spp., Rhizophagus spp., Sclerocystis spp., Septoglomus spp., Claroideoglomus spp., Ambispora spp., Archaeospora spp., Geosiphon pyriformis, Paraglomus spp., other species in the division Glomeromycota, or any combination thereof. In some embodiments, the Nod factors are M. loti LCO, S. meliloti LCO-IV, or S. meliloti LCO-V. A further embodiment of this aspect, which may be combined with any preceding embodiment that has one or more Nod factors produced by nitrogen-fixing bacteria or by mycorrhizal fungi, includes the modified receptor polypeptide binding one or more Nod factors with higher affinity than an unmodified receptor polypeptide. Yet another embodiment of this aspect, which may be combined with any preceding embodiment that has one or more Nod factors produced by nitrogen-fixing bacteria or by mycorrhizal fungi, includes the modified receptor polypeptide binding one or more Nod factors with higher selectivity than an unmodified receptor polypeptide. Still another embodiment of this aspect, which may be combined with any preceding embodiment that has one or more Nod factors produced by nitrogen-fixing bacteria or by mycorrhizal fungi, includes the modified receptor polypeptide binding one or more Nod factors with altered specificity as compared to an unmodified receptor polypeptide.

[0066] Yet another embodiment of this aspect, which may be combined with any of the preceding embodiments, further includes a LysM2 domain modified to include a hydrophobic patch on the surface of the LysM2 domain, wherein the modified plant LysM receptor polypeptide has enhanced affinity, selectivity, and/or specificity for one or more one or more Nod factors as compared to the unmodified plant LysM receptor polypeptide. An additional embodiment of this aspect includes the hydrophobic patch being within 30 Å, 20 Å, 10 Å, 7.5 Å, 5 Å, 4 Å, 3 Å, 2 Å, 1.5 Å, or 1 Å of a chitin binding motif. In a further embodiment of this aspect, which may be combined with any preceding embodiment that has a modified LysM2 domain, the LysM2 domain includes SEQ ID NO: 278, SEQ ID NO: 279, SEQ ID NO: 280, SEQ ID NO: 281, SEQ ID NO: 282, SEQ ID NO: 283, SEQ ID NO: 284, SEQ ID NO: 285, SEQ ID NO: 286, SEQ ID NO: 287, SEQ ID NO: 288, SEQ ID NO: 289, SEQ ID NO: 290, SEQ ID NO: 291, SEQ ID NO: 292, SEQ ID NO: 293, SEQ ID NO: 294, SEQ ID NO: 295, SEQ ID NO: 296, SEQ ID NO: 297, SEQ ID NO: 298, SEQ ID NO: 299, or SEQ ID NO: 300. In yet another embodiment of this aspect, which may be combined with any preceding embodiment that has a modified LysM2 domain, the hydrophobic patch was generated by deleting at least one non-hydrophobic amino acid residue, substituting at least one amino acid residue with a more hydrophobic amino acid, or combinations thereof. Still another embodiment of this aspect, which may be combined with any preceding embodiment that has a LysM2 domain, includes the at least one amino acid being identified by an amino acid sequence alignment with a LysM2 domain from a LysM high affinity Nod factor receptor that naturally has a hydrophobic patch that interacts with a Nod factor. In an additional embodiment of this aspect, the LysM2 domain from a LysM high affinity Nod factor receptor includes SEQ ID NO: 271, SEQ ID NO: 272, SEQ ID NO: 273, SEQ ID NO: 274, SEQ ID NO: 275, SEQ ID NO: 276, or SEQ ID NO: 277. In a further embodiment of this aspect, which may be combined with any preceding embodiment that has a LysM2 domain from a LysM high affinity Nod factor receptor, the at least one amino acid corresponds to the hydrophobic patch residues from SEQ ID NO: 223, SEQ ID NO: 249, SEQ ID NO: 250, SEQ ID NO: 251, SEQ ID NO: 254, SEQ ID NO: 257, or SEQ ID NO: 258. In still another embodiment of this aspect, which may be combined with any preceding embodiment that has a LysM2 domain from a LysM high affinity Nod factor receptor, the at least one amino acid corresponds to residues immediately adjacent to hydrophobic patch residues from SEQ ID NO: 223, SEQ ID NO: 249, SEQ ID NO: 250, SEQ ID NO: 251, SEQ ID NO: 254, SEQ ID NO: 257, or SEQ ID NO: 258. In yet another embodiment of this aspect, which may be combined with any preceding embodiment that has a LysM2 domain from a LysM high affinity Nod factor receptor, the at least one amino acid corresponds to the hydrophobic patch residues from SEQ ID NO: 252, SEQ ID NO: 253, SEQ ID NO: 255, SEQ ID NO: 256, SEQ ID NO: 259, SEQ ID NO: 260, SEQ ID NO: 228, SEQ ID NO: 229, SEQ ID NO: 230, SEQ ID NO: 231, SEQ ID NO: 233, or SEQ ID NO: 234. In an additional embodiment of this aspect, which may be combined with any preceding embodiment that has a LysM2 domain from a LysM high affinity Nod factor receptor, the at least one amino acid corresponds to residues immediately adjacent to hydrophobic patch residues from SEQ ID NO: 252, SEQ ID NO: 253, SEQ ID NO: 255, SEQ ID NO: 256, SEQ ID NO: 259, SEQ ID NO: 260, SEQ ID NO: 228, SEQ ID NO: 229, SEQ ID NO: 230, SEQ ID NO: 231, SEQ ID NO: 233, or SEQ ID NO: 234.

[0067] Yet another embodiment of this aspect, which may be combined with any preceding embodiment where the hydrophobic patch was generated by deleting at least one non-hydrophobic amino acid residue, includes the at least one amino acid being identified by structural modeling to identify a region in LysM2 where the hydrophobic patch can be engineered. A further embodiment of this aspect includes the structural modeling using the unmodified plant LysM amino acid sequence and a LysM domain three dimensional structure that has a known hydrophobic patch. An additional embodiment of this aspect includes the LysM domain three dimensional structure being a Medicago truncatula NFP ectodomain. Still another embodiment of this aspect, which may be combined with any preceding embodiment that has a LysM domain three dimensional structure that has a known hydrophobic patch, includes the known hydrophobic patch amino acid residues of the LysM domain three dimensional structure being or correspond to L147, L151, L152, L154, T156, K157 and V158 of the Medicago truncatula NFP ectodomain. A further embodiment of this aspect includes the alpha carbon of at least one amino acid being within 3 Å of an alpha carbon of a known hydrophobic patch amino acid residue in the structural alignment. Yet another embodiment of this aspect, which may be combined with any preceding embodiment that has structural modeling, includes the structural modeling being performed using SWISS-MODEL, PDB2PQR, APBS, PyMol, and APBS tools 2.1. Still another embodiment of this aspect, which may be combined with any preceding embodiment that has a modified LysM2 domain, includes the modified receptor polypeptide binding one or more Nod factors (lipochitooligosaccharides (LCOs)) produced by nitrogen-fixing bacteria or by mycorrhizal fungi. A further embodiment of this aspect includes the one or more Nod factors being produced by nitrogen-fixing bacteria selected from the group of Mesorhizobium loti, Mesorhizobium huakuii, Mesorhizobium mediterraneum, Mesorhizobium ciceri, Mesorhizobium spp., Rhizobium mongolense, Rhizobium tropici, Rhizobium etli phaseoli, Rhizobium giardinii, Rhizobium leguminosarum optionally R. leguminosarum trifolii, R. leguminosarum viciae, and R. leguminosarum phaseoli, Burkholderiales optionally symbionts of Mimosa, Sinorhizobium meliloti, Sinorhizobium medicae, Sinorhizobium fredii, Sinorhizobium NGR234, Azorhizobium caulinodans, Bradyrhizobium japonicum, Bradyrhizobium elkanii, Bradyrhizobium liaonginense, Frankia spp., or any combination thereof, or by mycorrhizal fungi selected from the group of Acaulosporaceae spp., Diversisporaceae spp., Gigasporaceae spp., Pacisporaceae spp., Funneliformis spp., Glomus spp., Rhizophagus spp., Sclerocystis spp., Septoglomus spp., Claroideoglomus spp., Ambispora spp., Archaeospora spp., Geosiphon pyriformis, Paraglomus spp., other species in the division Glomeromycota, or any combination thereof. In some embodiments, the Nod factors are M. loti LCO, S. meliloti LCO-IV, or S. meliloti LCO-V. An additional embodiment of this aspect, which may be combined with any preceding embodiment that has one or more Nod factors produced by nitrogen-fixing bacteria or by mycorrhizal fungi, includes the modified receptor polypeptide binding one or more Nod factors with higher affinity than an unmodified receptor polypeptide. In yet another embodiment of this aspect, which may be combined with any preceding embodiment that has one or more Nod factors produced by nitrogen-fixing bacteria or by mycorrhizal fungi, the modified receptor polypeptide binds one or more Nod factors with higher selectivity than an unmodified receptor polypeptide. In still another embodiment of this aspect, which may be combined with any preceding embodiment that has one or more Nod factors produced by nitrogen-fixing bacteria or by mycorrhizal fungi, the modified receptor polypeptide binds one or more Nod factors with altered specificity as compared to an unmodified receptor polypeptide.

[0068] Plant LysM receptors are a well known and well understood type of receptor. LysM receptors have three characteristic domains located in the ectodomain of the protein: LysM1, LysM2, and LysM3, which are present in this order on the protein sequence and separated by CxC motifs (see FIG. 20D). The LysM1 domain is located toward the N-terminal end of the protein sequence, and is preceded by an N-terminal signal peptide. The three LysM domains are clearly shown in FIGS. 14A-14C and 15A-15C that show alignments of the ectodomains of NFR1-type LysM Nod factor receptors and CERK6-type LysM chitin receptors, respectively. FIGS. 14A-14C show an amino acid sequence alignment of NFR1-type LysM Nod factor receptor ectodomain sequences (FIG. 14A shows the LysM1 domain, FIG. 14B shows the LysM2 domain, and FIG. 14C shows the LysM3 domain). The ectodomain sequences and full length sequences of the aligned NFR1-type LysM Nod factor receptors are as follows: Medicago truncatula Q6UD73.1|LYK3 ectodomain=SEQ ID NO: 168, full length sequence=SEQ ID NO: 163; Phaseolus vulgaris XP_007141617.1 ectodomain=SEQ ID NO: 169, full length sequence=SEQ ID NO: 301; Arachis hypogaea XP_029150476.1 ectodomain=SEQ ID NO: 170, full length sequence=SEQ ID NO: 302; Arachis hypogaea XP_029144024.1 ectodomain=SEQ ID NO: 171, full length sequence=SEQ ID NO: 303; Cajanus cajan XP_020213700.2 ectodomain=SEQ ID NO: 172, full length sequence=SEQ ID NO: 304; Cicer arietinum XP_004491136.1 ectodomain=SEQ ID NO: 173, full length sequence=SEQ ID NO: 305; Abrus precatorius XP_027332267.1 ectodomain=SEQ ID NO: 174, full length sequence=SEQ ID NO: 306; Glycine max XP_006575588.1 ectodomain=SEQ ID NO: 175, full length sequence=SEQ ID NO: 307; Glycine max XP_006595821.2 ectodomain=SEQ ID NO: 176, full length sequence=SEQ ID NO: 308; Lupinus angustifolius XP_019434083.1 ectodomain=SEQ ID NO: 177, full length sequence=SEQ ID NO: 309; Lupinus angustifolius XP_019461629.1 ectodomain=SEQ ID NO: 178, full length sequence=SEQ ID NO: 310; Lotus japonicus CAE02590.1|NFR1 ectodomain=SEQ ID NO: 179, full length sequence=SEQ ID NO: 162; Pisum sativum ARX80051.1|Sym37 ectodomain=SEQ ID NO: 180, full length sequence=SEQ ID NO: 311; Vigna angularis KOM46748.1 ectodomain=SEQ ID NO: 181, full length sequence=SEQ ID NO: 312; Vigna radiata var. radiata XP_014504127.1 ectodomain=SEQ ID NO: 182, full length sequence=SEQ ID NO: 313; Vigna unguiculata XP_027939826.1 ectodomain=SEQ ID NO: 183, full length sequence=SEQ ID NO: 314; Arachis duranensis XP_020982945.1 ectodomain=SEQ ID NO: 184, full length sequence=SEQ ID NO: 315; Arachis ipaensis XP_020962820.1 ectodomain=SEQ ID NO: 185, full length sequence=SEQ ID NO: 316; Chamaecrista fasciculata 2879S20281 ectodomain=SEQ ID NO: 186, full length sequence=SEQ ID NO: 317; Mimosa pudica Scaffold15743 ectodomain=SEQ ID NO: 187, full length sequence=SEQ ID NO: 318; Lupinus albus Chr04g0249871 ectodomain=SEQ ID NO: 188, full length sequence=SEQ ID NO: 319; Spatholobus suberectus TKY57029.1 ectodomain=SEQ ID NO: 189, full length sequence=SEQ ID NO: 320; and Prosopis alba XP_028753017.1 ectodomain=SEQ ID NO: 190, full length sequence=SEQ ID NO: 321. FIGS. 15A-15C show an amino acid sequence alignment of CERK6-type LysM chitin receptor ectodomain sequences (FIG. 15A shows the LysM1 domain, FIG. 15B shows the LysM2 domain, and FIG. 15C shows the LysM3 domain). The ectodomain sequences and full length sequences of the aligned CERK6-type LysM chitin receptors are as follows: Lotus japonicus BAI79273.1|CERK6 ectodomain=SEQ ID NO: 191, full length sequence=SEQ ID NO: 164; Phaseolus vulgaris XP_007146026.1 ectodomain=SEQ ID NO: 192, full length sequence=SEQ ID NO: 322; Arachis ipaensis XP_016196976.1 ectodomain=SEQ ID NO: 193, full length sequence=SEQ ID NO: 323; Arachis duranensis XP_015958400.1 ectodomain=SEQ ID NO: 194, full length sequence=SEQ ID NO: 324; Cajanus cajan XP_020220445.1 ectodomain=SEQ ID NO: 195, full length sequence=SEQ ID NO: 325; Cicer arietinum XP_004502028.1 ectodomain=SEQ ID NO: 196, full length sequence=SEQ ID NO: 326; Abrus precatorius XP_027343427.1 ectodomain=SEQ ID NO: 197, full length sequence=SEQ ID NO: 327; M. truncatula XP_003601376.2|LYK9 ectodomain=SEQ ID NO: 198, full length sequence=SEQ ID NO: 216; Glycine max XP_003555584.1 ectodomain=SEQ ID NO: 199, full length sequence=SEQ ID NO: 328; Glycine max XP_003518454.1 ectodomain=SEQ ID NO: 200, full length sequence=SEQ ID NO: 329; Lupinus angustifolius XP_019425563.1 ectodomain=SEQ ID NO: 201, full length sequence=SEQ ID NO: 330; Lupinus angustifolius XP_019455825.1 ectodomain=SEQ ID NO: 202, full length sequence=SEQ ID NO: 331; Vigna angularis XP_017436810.1 ectodomain=SEQ ID NO: 203, full length sequence=SEQ ID NO: 332; Vigna radiata XP_014509761.1 ectodomain=SEQ ID NO: 204, full length sequence=SEQ ID NO: 333; Vigna unguiculata XP_027932400.1 ectodomain=SEQ ID NO: 205, full length sequence=SEQ ID NO: 334; Arachis hypogaea XP_025693415.1 ectodomain=SEQ ID NO: 206, full length sequence=SEQ ID NO: 334; Mimosa pudica Scaffold8584 ectodomain=SEQ ID NO: 207, full length sequence=SEQ ID NO: 335; Chamaecrista fasciculata QANZ01053660 ectodomain=SEQ ID NO: 208, full length sequence=SEQ ID NO: 336; Lupinus albus Chr04g0263521 ectodomain=SEQ ID NO: 209, full length sequence=SEQ ID NO: 337; Pisum sativum LYK9 ectodomain=SEQ ID NO: 210, full length sequence=SEQ ID NO: 338; Arachis hypogaea XP_025645378.1 ectodomain=SEQ ID NO: 211, full length sequence=SEQ ID NO: 323; Spatholobus suberectus TKY72192.1 ectodomain=SEQ ID NO: 212, full length sequence=SEQ ID NO: 339; and Prosopis alba XP_028758101.1 ectodomain=SEQ ID NO: 213, full length sequence=SEQ ID NO: 340. Additional LysM receptors include SEQ ID NO: 164, SEQ ID NO: 216, SEQ ID NO: 162, SEQ ID NO: 163, SEQ ID NO: 217, SEQ ID NO: 218, SEQ ID NO: 219, SEQ ID NO: 220, SEQ ID NO: 221, SEQ ID NO: 222, SEQ ID NO: 223, SEQ ID NO: 224, SEQ ID NO: 225, SEQ ID NO: 226, SEQ ID NO: 227, SEQ ID NO: 228, SEQ ID NO: 229, SEQ ID NO: 230, SEQ ID NO: 231, SEQ ID NO: 232, SEQ ID NO: 233, SEQ ID NO: 234, SEQ ID NO: 235, SEQ ID NO: 236, SEQ ID NO: 237, SEQ ID NO: 238, SEQ ID NO: 239, SEQ ID NO: 240, SEQ ID NO: 241, SEQ ID NO: 242, SEQ ID NO: 243, SEQ ID NO: 244, SEQ ID NO: 245, SEQ ID NO: 246, SEQ ID NO: 247, or SEQ ID NO: 248. The category of plant LysM receptors is therefore known by one of skill in the art.

[0069] As used in the present disclosure, the term “affinity” refers to affinity for Nod factors generally. The LysM receptors of the present disclosure may contain a modified motif in region II, a modified motif in region IV, and optionally a modified motif in region III of the LysM1 domain. The LysM1 domain is clearly shown in FIG. 14A that shows an alignment of NFR1-type LysM Nod factor receptors, and clearly designates region II, region III, and region IV within the LysM1 domain. Without wanting to be limited to theory, it is believed that LysM receptors with the modified motifs in regions of the LysM1 domain have higher affinity for Nod factors as compared to LysM receptors without the modified motifs, but LysM receptors with motif-swapped LysM1 domains would also provide higher affinity for Nod factors and other agonists. In addition, the LysM receptors of the present disclosure may contain a hydrophobic patch in their LysM2 domain. Without wanting to be limited to theory, it is believed that LysM receptors with the hydrophobic patch have higher affinity for LCOs as compared to LysM receptors without the hydrophobic patch, but LysM receptors with domain-swapped LysM1 domains would also provide higher affinity for LCOs and other agonists. Affinity can be measured using the methods described in the Examples below, and using other methods known in the art that measure binding kinetics, association, dissociation, and KD.

[0070] As used in the present disclosure, the term “selectivity” refers to the differentiation between different polysaccharide ligands, specifically between Nod factors (lipochitooligosaccharides (LCOs)) as a class and other polysaccharide ligands, preferably chitins (chitooligosaccharides (COs)). Without wanting to be limited to theory, it is believed that the modified motifs in regions of the LysM1 domain or motif-swapped LysM1 domains confer selective recognition of Nod factors over chitins, and that therefore LysM receptors with modified motifs have increased or altered selectivity as compared to LysM receptors without modified motifs. In addition, without wanting to be limited to theory, it is believed that the hydrophobic patch in LysM2 confers selective recognition of Nod factors over chitins, and that therefore LysM receptors with the hydrophobic patch have increased or altered selectivity as compared to LysM receptors without the hydrophobic patch.

[0071] As used in the present disclosure, the term “specificity” refers to the differentiation between different Nod factors (lipochitooligosaccharides (LCOs)) produced by different nitrogen-fixing bacterial species and/or mycorrhizal fungi. The LysM receptors of the present disclosure may contain a LysM1 domain where motifs in the LysM1 domain have been replaced with the corresponding motifs of the LysM1 domain from a donor LysM receptor. These motifs may be a motif in region II, a motif in region IV, and optionally a motif in region III. Without wanting to be limited to theory, it is believed that if the donor LysM receptor is a high affinity and specificity LysM Nod factor receptor such as a legume NFR1 LysM Nod factor receptor, this replacement can alter the specificity of the LysM receptor. LysM receptors with a hydrophobic patch in the LysM2 domain may also provide specificity for specific Nod factors. The LysM1 and LysM2 domains are clearly shown in FIGS. 14A-14C and 15A-15C that show alignments of the ectodomains of NFR1-type Nod factor receptors and CERK6-type chitin receptors, respectively. FIG. 14A clearly designates region II, region III, and region IV within the LysM1 domain. LysM1 motif modification and/or replacement can confer highly specific recognition of Nod factors produced by particular nitrogen-fixing bacterial species and/or mycorrhizal fungal species, and therefore LysM receptors with the modified and/or replaced domain can have altered specificity as compared to LysM receptors without the replaced domain, which allows the modified receptors to recognize different nitrogen-fixing bacterial species and/or mycorrhizal fungal species. For at least these reasons, the high affinity, high selectivity, and/or high specificity LysM receptors of the present disclosure will be readily understood by one of skill in the art.

### Genetically Altered Plants and Plant Parts

[0072] A further aspect of the present disclosure includes a genetically altered plant or part thereof, including a modified plant LysM receptor of any one of the embodiments described in the section “Modified plant LysM receptors”. An additional embodiment of this aspect includes the modified LysM receptor polypeptide having higher affinity, higher selectivity, and/or altered specificity for one or more Nod factors than an unmodified LysM receptor polypeptide and the expression of the modified LysM receptor polypeptide allowing the plant or part thereof to recognize one or more Nod factors with high affinity, high selectivity, and/or altered specificity. Yet another embodiment of this aspect, which may be combined with any one of the preceding embodiments, includes the one or more Nod factors (lipochitooligosaccharides (LCOs)) are produced by nitrogen-fixing bacteria or by mycorrhizal fungi. A further embodiment of this aspect includes the one or more Nod factors produced by nitrogen-fixing bacteria being selected from the group of Mesorhizobium loti, Mesorhizobium huakuii, Mesorhizobium mediterraneum, Mesorhizobium ciceri, Mesorhizobium spp., Rhizobium mongolense, Rhizobium tropici, Rhizobium etli phaseoli, Rhizobium giardinii, Rhizobium leguminosarum optionally R. leguminosarum trifolii, R. leguminosarum viciae, and R. leguminosarum phaseoli, Burkholderiales optionally symbionts of Mimosa, Sinorhizobium meliloti, Sinorhizobium medicae, Sinorhizobium fredii, Sinorhizobium NGR234, Azorhizobium caulinodans, Bradyrhizobium japonicum, Bradyrhizobium elkanii, Bradyrhizobium liaonginense, Frankia spp., or any combination thereof, or by mycorrhizal fungi selected from the group of Acaulosporaceae spp., Diversisporaceae spp., Gigasporaceae spp., Pacisporaceae spp., Funneliformis spp., Glomus spp., Rhizophagus spp., Sclerocystis spp., Septoglomus spp., Claroideoglomus spp., Ambispora spp., Archaeospora spp., Geosiphon pyriformis, Paraglomus spp., other species in the division Glomeromycota, or any combination thereof. In some embodiments, the Nod factors are M. loti LCO, S. meliloti LCO-IV, or S. meliloti LCO-V. Still another embodiment of this aspect, which may be combined with any one of the preceding embodiments, includes the modified LysM receptor polypeptide being localized to a plant cell plasma membrane. Yet another embodiment of this aspect includes the plant cell being a root cell. An additional embodiment of this aspect includes the root cell being a root epidermal cell. A further embodiment of this aspect, which may be combined with any of the preceding embodiments includes the modified LysM receptor polypeptide being expressed in a developing plant root system. An additional embodiment of this aspect, which may be combined with any of the preceding embodiments, includes a nucleic acid sequence encoding the modified LysM receptor polypeptide, wherein the nucleic acid sequence is operably linked to a promoter. Still another embodiment of this aspect includes the promoter being a root specific promoter, a constitutive promoter, or a combination thereof. In yet another embodiment of this aspect, which may be combined with any preceding embodiment that has a promoter, the promoter is selected from the group of a NFR1 promoter, a NFR5/NFP promoter, a LYK3 promoter, a CERK6 promoter, a NFR5/NFP promoter, a Lotus japonicus NFR5 promoter (SEQ ID NO: 261), a Lotus japonicus NFR1 promoter (SEQ ID NO: 261), a Lotus japonicus CERK6 promoter (SEQ ID NO: 264), a Medicago truncatula NFP promoter (SEQ ID NO: 263), a Medicago truncatula LYK3 promoter (SEQ ID NO: 262), a maize allothioneine promoter, a chitinase promoter, a maize ZRP2 promoter, a tomato LeExtl promoter, a glutamine synthetase soybean root promoter, a RCC3 promoter, a rice antiquitine promoter, a LRR receptor kinase promoter, or an Arabidopsis pCO2 promoter. In an additional embodiment of this aspect, which may be combined with any preceding embodiment that has a promoter, the promoter is selected from the group of a CaMV35S promoter, a derivative of the CaMV35S promoter, a maize ubiquitin promoter, a trefoil promoter, a vein mosaic cassava virus promoter, or an Arabidopsis UBQ10 promoter.

[0073] An additional aspect of the present disclosure includes a genetically altered plant or part thereof including a first modified LysM receptor polypeptide of any one of the preceding embodiments and a second modified LysM receptor polypeptide including a LysM2 domain modified to include a hydrophobic patch on the surface of the LysM2 domain, wherein the second modified plant LysM receptor polypeptide has enhanced affinity, selectivity, and/or specificity for one or more Nod factors as compared to a second unmodified plant LysM receptor polypeptide. An additional embodiment of this aspect includes the hydrophobic patch being within 30 Å, 20 Å, 10 Å, 7.5 Å, 5 Å, 4 Å, 3 Å, 2 Å, 1.5 Å, or 1 Å of a chitin binding motif. In a further embodiment of this aspect, which may be combined with any of the preceding embodiments, the LysM2 domain includes SEQ ID NO: 278, SEQ ID NO: 279, SEQ ID NO: 280, SEQ ID NO: 281, SEQ ID NO: 282, SEQ ID NO: 283, SEQ ID NO: 284, SEQ ID NO: 285, SEQ ID NO: 286, SEQ ID NO: 287, SEQ ID NO: 288, SEQ ID NO: 289, SEQ ID NO: 290, SEQ ID NO: 291, SEQ ID NO: 292, SEQ ID NO: 293, SEQ ID NO: 294, SEQ ID NO: 295, SEQ ID NO: 296, SEQ ID NO: 297, SEQ ID NO: 298, SEQ ID NO: 299, or SEQ ID NO: 300. In yet another embodiment of this aspect, which may be combined with any one of the preceding embodiments, the hydrophobic patch was generated by deleting at least one non-hydrophobic amino acid residue, substituting at least one amino acid residue with a more hydrophobic amino acid, or combinations thereof. Still another embodiment of this aspect, which may be combined with any one of the preceding embodiments, includes the at least one amino acid being identified by an amino acid sequence alignment with a LysM2 domain from a LysM high affinity Nod factor receptor that naturally has a hydrophobic patch that interacts with a Nod factor. In an additional embodiment of this aspect, the LysM2 domain from a LysM high affinity Nod factor receptor includes SEQ ID NO: 271, SEQ ID NO: 272, SEQ ID NO: 273, SEQ ID NO: 274, SEQ ID NO: 275, SEQ ID NO: 276, or SEQ ID NO: 277. In a further embodiment of this aspect, which may be combined with any preceding embodiment that has a LysM2 domain from a LysM high affinity Nod factor receptor, the at least one amino acid corresponds to the hydrophobic patch residues from SEQ ID NO: 223, SEQ ID NO: 249, SEQ ID NO: 250, SEQ ID NO: 251, SEQ ID NO: 254, SEQ ID NO: 257, or SEQ ID NO: 258. In still another embodiment of this aspect, which may be combined with any preceding embodiment that has a LysM2 domain from a LysM high affinity Nod factor receptor, the at least one amino acid corresponds to residues immediately adjacent to hydrophobic patch residues from SEQ ID NO: 223, SEQ ID NO: 249, SEQ ID NO: 250, SEQ ID NO: 251, SEQ ID NO: 254, SEQ ID NO: 257, or SEQ ID NO: 258. In yet another embodiment of this aspect, which may be combined with any preceding embodiment that has a LysM2 domain from a LysM high affinity Nod factor receptor, the at least one amino acid corresponds to the hydrophobic patch residues from SEQ ID NO: 252, SEQ ID NO: 253, SEQ ID NO: 255, SEQ ID NO: 256, SEQ ID NO: 259, SEQ ID NO: 260, SEQ ID NO: 228, SEQ ID NO: 229, SEQ ID NO: 230, SEQ ID NO: 231, SEQ ID NO: 233, or SEQ ID NO: 234. In an additional embodiment of this aspect, which may be combined with any preceding embodiment that has a LysM2 domain from a LysM high affinity Nod factor receptor, the at least one amino acid corresponds to residues immediately adjacent to hydrophobic patch residues from SEQ ID NO: 252, SEQ ID NO: 253, SEQ ID NO: 255, SEQ ID NO: 256, SEQ ID NO: 259, SEQ ID NO: 260, SEQ ID NO: 228, SEQ ID NO: 229, SEQ ID NO: 230, SEQ ID NO: 231, SEQ ID NO: 233, or SEQ ID NO: 234. Yet another embodiment of this aspect, which may be combined with any preceding embodiment where the hydrophobic patch was generated by deleting at least one non-hydrophobic amino acid residue, includes the at least one amino acid being identified by structural modeling to identify a region in LysM2 where the hydrophobic patch can be engineered. A further embodiment of this aspect includes the structural modeling using the unmodified plant LysM amino acid sequence and a LysM domain three dimensional structure that has a known hydrophobic patch. An additional embodiment of this aspect includes the LysM domain three dimensional structure being a Medicago truncatula NFP ectodomain. Still another embodiment of this aspect, which may be combined with any preceding embodiment that has a LysM domain three dimensional structure that has a known hydrophobic patch, includes the known hydrophobic patch amino acid residues of the LysM domain three dimensional structure being or correspond to L147, L151, L152, L154, T156, K157 and V158 of the Medicago truncatula NFP ectodomain. A further embodiment of this aspect includes the alpha carbon of at least one amino acid being within 3 Å of an alpha carbon of a known hydrophobic patch amino acid residue in the structural alignment. Yet another embodiment of this aspect, which may be combined with any preceding embodiment that has structural modeling, includes the structural modeling being performed using SWISS-MODEL, PDB2PQR, APBS, PyMol, and APBS tools 2.1. Still another embodiment of this aspect, which may be combined with any of the preceding embodiments, includes the modified receptor polypeptide binding one or more Nod factors (lipochitooligosaccharides (LCOs)) produced by nitrogen-fixing bacteria or by mycorrhizal fungi. A further embodiment of this aspect includes the one or more Nod factors being produced by nitrogen-fixing bacteria selected from the group of Mesorhizobium loti, Mesorhizobium huakuii, Mesorhizobium mediterraneum, Mesorhizobium ciceri, Mesorhizobium spp., Rhizobium mongolense, Rhizobium tropici, Rhizobium etli phaseoli, Rhizobium giardinii, Rhizobium leguminosarum optionally R. leguminosarum trifolii, R. leguminosarum viciae, and R. leguminosarum phaseoli, Burkholderiales optionally symbionts of Mimosa, Sinorhizobium meliloti, Sinorhizobium medicae, Sinorhizobium fredii, Sinorhizobium NGR234, Azorhizobium caulinodans, Bradyrhizobium japonicum, Bradyrhizobium elkanii, Bradyrhizobium liaonginense, Frankia spp., or any combination thereof, or by mycorrhizal fungi selected from the group of Acaulosporaceae spp., Diversisporaceae spp., Gigasporaceae spp., Pacisporaceae spp., Funneliformis spp., Glomus spp., Rhizophagus spp., Sclerocystis spp., Septoglomus spp., Claroideoglomus spp., Ambispora spp., Archaeospora spp., Geosiphon pyriformis, Paraglomus spp., other species in the division Glomeromycota, or any combination thereof. In some embodiments, the Nod factors are M. loti LCO, S. meliloti LCO-IV, or S. meliloti LCO-V. An additional embodiment of this aspect, which may be combined with any preceding embodiment that has one or more Nod factors produced by nitrogen-fixing bacteria or by mycorrhizal fungi, includes the second modified receptor polypeptide binding one or more Nod factors with higher affinity than a second unmodified receptor polypeptide. In yet another embodiment of this aspect, which may be combined with any preceding embodiment that has one or more Nod factors produced by nitrogen-fixing bacteria or by mycorrhizal fungi, the second modified receptor polypeptide binds one or more Nod factors with higher selectivity than a second unmodified receptor polypeptide. In still another embodiment of this aspect, which may be combined with any preceding embodiment that has one or more Nod factors produced by nitrogen-fixing bacteria or by mycorrhizal fungi, the second modified receptor polypeptide binds one or more Nod factors with altered specificity as compared to a second unmodified receptor polypeptide. Still another embodiment of this aspect, which may be combined with any one of the preceding embodiments, includes the modified LysM receptor polypeptides being localized to a plant cell plasma membrane. Yet another embodiment of this aspect includes the plant cell being a root cell. An additional embodiment of this aspect includes the root cell being a root epidermal cell. A further embodiment of this aspect, which may be combined with any of the preceding embodiments, includes the modified LysM receptor polypeptides being expressed in a developing plant root system. An additional embodiment of this aspect, which may be combined with any of the preceding embodiments, includes a first nucleic acid sequence encoding the first modified plant LysM receptor polypeptide and a second nucleic acid sequence encoding the second modified plant LysM receptor polypeptide, wherein the first nucleic acid sequence is operably linked to a first promoter, and wherein the second nucleic acid sequence is operably linked to a second promoter. Still another embodiment of this aspect includes the first and second promoters being root specific promoters, constitutive promoters, or a combination thereof. In yet another embodiment of this aspect, which may be combined with any preceding embodiment that has a promoter, the first and/or second promoters are selected from the group of a NFR1 promoter, a NFR5/NFP promoter, a LYK3 promoter, a CERK6 promoter, a NFR5NFP promoter, a Lotus japonicus NFR5 promoter (SEQ ID NO: 261), a Lotus japonicus NFR1 promoter (SEQ ID NO: 261), a Lotus japonicus CERK6 promoter (SEQ ID NO: 264), a Medicago truncatula NFP promoter (SEQ ID NO: 263), a Medicago truncatula LYK3 promoter (SEQ ID NO: 262), a maize allothioneine promoter, a chitinase promoter, a maize ZRP2 promoter, a tomato LeExtl promoter, a glutamine synthetase soybean root promoter, a RCC3 promoter, a rice antiquitine promoter, a LRR receptor kinase promoter, or an Arabidopsis pCO2 promoter. In an additional embodiment of this aspect, which may be combined with any preceding embodiment that has a promoter, the first and/or second promoters are selected from the group of a CaMV35S promoter, a derivative of the CaMV35S promoter, a maize ubiquitin promoter, a trefoil promoter, a vein mosaic cassava virus promoter, or an Arabidopsis UBQ10 promoter.

[0074] In an additional embodiment of this aspect, which may be combined with any of the preceding embodiments, the plant is selected from the group of cassava (e.g., manioc, yucca, Manihot esculenta), corn (e.g., maize, Zea mays), rice (e.g., indica rice, japonica rice, aromatic rice, glutinous rice, Oryza sativa, Oryza glaberrima), wild rice (e.g., Zizania spp., Porteresia spp.), barley (e.g., Hordeum vulgare), sorghum (e.g., Sorghum bicolor), millet (e.g., finger millet, fonio millet, foxtail millet, pearl millet, barnyard millets, Eleusine coracana, Panicum sumatrense, Panicum milaceum, Setaria italica, Pennisetum glaucum, Digitaria spp., Echinocloa spp.), teff (e.g., Eragrostis tef), oat (e.g., Avena sativa), triticale (e.g., X Triticosecale Wittmack, Triticosecale schlanstedtense Wittm., Triticosecale neoblaringhemii A. Camus, Triticosecale neoblaringhemii A. Camus), rye (e.g., Secale cereale, Secale cereanum), wheat (e.g., common wheat, spelt, durum, einkorn, emmer, kamut, Triticum aestivum, Triticum spelta, Triticum durum, Triticum urartu, Triticum monococcum, Triticum turanicum, Triticum spp.), Trema spp. (e.g., Trema cannabina, Trema cubense, Trema discolor, Trema domingensis, Trema integerrima, Trema lamarckiana, Trema micrantha, Trema orientalis, Trema philippinensis, Trema strigilosa, Trema tomentosa, Trema levigata), apple (e.g., Malus domestica, Malus pumila, Pyrus malus), pear (e.g., Pyrus communis, Pyrus×bretschneideri, Pyrus pyrifolia, Pyrus sinkiangensis, Pyrus pashia, Pyrus spp.), plum (e.g., Mirabelle, greengage, damson, Prunus domestica, Prunus salicina, Prunus mume), apricot (e.g., Prunus armeniaca, Prunus brigantine, Prunus mandshurica), peach (e.g., Prunus persica), almond (e.g., Prunus dukis, Prunus amygdalus), walnut (e.g., Persian walnut, English walnut, black walnut, Juglans regia, Juglans nigra, Juglans cinerea, Juglans californica), strawberry (e.g., Fragaria×ananassa, Fragaria chiloensis, Fragaria virginiana, Fragaria vesca), raspberry (e.g., European red raspberry, black raspberry, Rubus idaeus L., Rubus occidentalis, Rubus strigosus), blackberry (e.g., evergreen blackberry, Himalayan blackberry, Rubus fruticosus, Rubus ursinus, Rubus laciniatus, Rubus argutus, Rubus armeniacus, Rubus plicatus, Rubus ulmifolius, Rubus allegheniensis, Rubus subgenus Eubatus sect. Moriferi & Ursini), red currant (e.g., white currant, Ribes rubrum), black currant (e.g., cassis, Ribes nigrum), gooseberry (e.g., Ribes uva-crispa, Ribes grossulari, Ribes hirtellum), melon (e.g., watermelon, winter melon, casabas, cantaloupe, honeydew, muskmelon, Citrullus lanatus, Benincasa hispida, Cucumis melo, Cucumis melo cantalupensis, Cucumis melo inodorus, Cucumis melo reticulatus), cucumber (e.g., slicing cucumbers, pickling cucumbers, English cucumber, Cucumis sativus), pumpkin (e.g., Cucurbita pepo, Cucurbita maxima), squash (e.g., gourd, Cucurbita argyrosperma, Cucurbita ficifolia, Cucurbita maxima, Cucurbita moschata), grape (e.g., Vitis vinifera, Vitis amurensis, Vitis labrusca, Vitis mustangensis, Vitis riparia, Vitis rotundifolia), bean (e.g., Phaseolus vulgaris, Phaseolus lunatus, Vigna angularis, Vigna radiate, Vigna mungo, Phaseolus coccineus, Vigna umbellate, Vigna acontifolia, Phaseolus acutifolius, Vicia faba, Vicia faba equine, Phaseolus spp., Vigna spp.), soybean (e.g., soy, soya bean, Glycine max, Glycine soja), pea (e.g., Pisum spp., Pisum sativum var. sativum, Pisum sativum var. arvense), pea (e.g., Pisum spp., Pisum sativum var. sativum, Pisum sativum var. arvense), chickpea (e.g., garbanzo, Bengal gram, Cicer arietinum), cowpea (e.g., Vigna unguiculata), pigeon pea (e.g., Arhar/Toor, caj an pea, Congo bean, gandules, Caganus cajan), lentil (e.g., Lens culinaris), Bambara groundnut (e.g., earth pea, Vigna subterranea), lupin (e.g., Lupinus spp.), pulses (e.g., minor pulses, Lablab purpureaus, Canavalia ensiformis, Canavalia gladiate, Psophocarpus tetragonolobus, Mucuna pruriens var. utilis, Pachyrhizus erosus), Medicago spp. (e.g., Medicago sativa, Medicago truncatula, Medicago arborea), Lotus spp. (e.g., Lotus japonicus), forage legumes (e.g., Leucaena spp., Albizia spp., Cyamopsis spp., Sesbania spp., Stylosanthes spp., Trifolium spp., Vicia spp.), indigo (e.g., Indigofera spp., Indigofera tinctoria, Indigofera suffruticosa, Indigofera articulata, Indigofera oblongifolia, Indigofera aspalthoides, Indigofera suffruticosa, Indigofera arrecta), legume trees (e.g., locust trees, Gleditsia spp., Robinia spp., Kentucky coffeetree, Gymnocladus dioicus, Acacia spp., Laburnum spp., Wisteria spp.), or hemp (e.g., cannabis, Cannabis sativa). In a further embodiment of this aspect, which may be combined with any of the preceding embodiments, the plant part is a leaf, a stem, a root, a root primordia, a flower, a seed, a fruit, a kernel, a grain, a cell, or a portion thereof. An additional embodiment of this aspect includes the plant part being a fruit, a kernel, or a grain.

[0075] In some aspects, the present disclosure relates to a pollen grain or an ovule of the genetically altered plant of any of the above embodiments.

[0076] In some aspects, the present disclosure relates to a protoplast produced from the plant of any of the above embodiments.

[0077] In some aspects, the present disclosure relates to a tissue culture produced from protoplasts or cells from the plant of any of the above embodiments, wherein the cells or protoplasts are produced from a plant part selected from the group of leaf, anther, pistil, stem, petiole, root, root primordia, root tip, fruit, seed, flower, cotyledon, hypocotyl, embryo, or meristematic cell.

[0078] An additional embodiment of any of the above genetically altered plants includes the genetic alteration allowing the genetically altered plant to recognize a different specific nitrogen-fixing bacterial species and/or specific mycorrhizal fungal species as compared to a plant without the genetic alteration. Still another embodiment of any of the above genetically altered plants includes the genetic alteration providing the plant with the ability to recognize one or more Nod factors produced by nitrogen-fixing bacteria and/or mycorrhizal fungi with high affinity, high selectivity, and/or high specificity. In an additional embodiment of this aspect, the plant is transplanted into conditions where the ability to recognize the one or more Nod factors produced by nitrogen-fixing bacteria and/or mycorrhizal fungi results in increased growth, yield, and/or biomass, as compared to a plant grown under the same conditions that lacks the one or more genetic alterations. In some embodiments, the plant is cultivated in nutrient-poor soil. A further embodiment of any of the above genetically altered plants includes the genetically altered plant being able to be grown in different agricultural conditions (e.g., different soils containing different symbiotic microbial species, etc.). Still another embodiment of this aspect includes the genetic alteration providing the plant with specific recognition of one or more Nod factors produced by a specific nitrogen-fixing bacterial species and/or specific mycorrhizal fungal species, whereby that species may already be present in the soil or may be provided (e.g., via seed treatment, spray application, soil inoculum, etc.). Yet another embodiment of any of the above genetically altered plants includes the genetically altered plant being able to be grown with different crop species (e.g., different crop rotations, etc.).

### Methods of Producing and Cultivating Genetically Altered Plants

[0079] A further aspect of the present disclosure relates to methods of producing the genetically altered plant of the preceding embodiments including the modified LysM receptor polypeptide, including introducing a genetic alteration to the plant including a nucleic acid sequence encoding the modified LysM receptor polypeptide. An additional embodiment of this aspect includes the nucleic acid sequence being operably linked to a promoter. Yet another embodiment of this aspect includes the promoter being a root specific promoter, a constitutive promoters, or a combination thereof. Still another embodiment of this aspect, which may be combined with any preceding embodiment that has a promoter, includes the promoter being selected from the group of a NFR1 promoter, a NFR5/NFP promoter, a LYK3 promoter, a CERK6 promoter, a NFR5/NFP promoter, a Lotus japonicus NFR5 promoter (SEQ ID NO: 261), a Lotus japonicus NFR1 promoter (SEQ ID NO: 261), a Lotus japonicus CERK6 promoter (SEQ ID NO: 264), a Medicago truncatula NFP promoter (SEQ ID NO: 263), a Medicago truncatula LYK3 promoter (SEQ ID NO: 262), a maize allothioneine promoter, a chitinase promoter, a maize ZRP2 promoter, a tomato LeExtl promoter, a glutamine synthetase soybean root promoter, a RCC3 promoter, a rice antiquitine promoter, a LRR receptor kinase promoter, or an Arabidopsis pCO2 promoter. Still another embodiment of this aspect, which may be combined with any preceding embodiment that has a promoter, includes the promoter is selected from the group of a CaMV35S promoter, a derivative of the CaMV35S promoter, a maize ubiquitin promoter, a trefoil promoter, a vein mosaic cassava virus promoter, or an Arabidopsis UBQ10 promoter. An additional embodiment of this aspect, which may be combined with any of the preceding embodiments, includes the nucleic acid sequence being inserted into the genome of the plant so that the nucleic acid sequence is operably linked to an endogenous promoter. A further embodiment of this aspect includes the endogenous promoter being a root specific promoter. A further embodiment of this aspect that can be combined with any of the preceding embodiments includes a plant or plant part produced by the method of any one of the preceding embodiments.

[0080] A further aspect of the present disclosure relates to methods of producing the genetically altered plant of the preceding embodiments including a first modified LysM receptor polypeptide and a second LysM receptor polypeptide, including introducing a genetic alteration to the plant including a first nucleic acid sequence encoding the first modified LysM receptor polypeptide and introducing a genetic alteration to the plant including a second nucleic acid sequence encoding the second modified LysM receptor polypeptide. An additional embodiment of this aspect includes the first nucleic acid sequence being operably linked to a first promoter, and the second nucleic acid sequence being operably linked to a second promoter. Yet another embodiment of this aspect includes the first and second promoters being root specific promoters, constitutive promoters, or a combination thereof. Still another embodiment of this aspect, which may be combined with any preceding embodiment that has a promoter, includes the first and/or second promoters are selected from the group of a NFR1 promoter, a NFR5/NFP promoter, a LYK3 promoter, a CERK6 promoter, a NFR5/NFP promoter, a Lotus japonicus NFR5 promoter (SEQ ID NO: 261), a Lotus japonicus NFR1 promoter (SEQ ID NO: 261), a Lotus japonicus CERK6 promoter (SEQ ID NO: 264), a Medicago truncatula NFP promoter (SEQ ID NO: 263), a Medicago truncatula LYK3 promoter (SEQ ID NO: 262), a maize allothioneine promoter, a chitinase promoter, a maize ZRP2 promoter, a tomato LeExtl promoter, a glutamine synthetase soybean root promoter, a RCC3 promoter, a rice antiquitine promoter, a LRR receptor kinase promoter, or an Arabidopsis pCO2 promoter. An additional embodiment of this aspect, which may be combined with any preceding embodiment that has a promoter, includes the first and/or second promoters are selected from the group of a CaMV35S promoter, a derivative of the CaMV35S promoter, a maize ubiquitin promoter, a trefoil promoter, a vein mosaic cassava virus promoter, or an Arabidopsis UBQ10 promoter. Yet another embodiment of this aspect, which may be combined with any of the preceding embodiments, includes the first nucleic acid sequence being inserted into the genome of the plant so that the first nucleic acid sequence is operably linked to a first endogenous promoter, and/or the second nucleic acid sequence being inserted into the genome of the plant so that the second nucleic acid sequence is operably linked to a second endogenous promoter. A further embodiment of this aspect includes the first and second endogenous promoters being root specific promoters. A further embodiment of this aspect that can be combined with any of the preceding embodiments includes a plant or plant part produced by the method of any one of the preceding embodiments.

[0081] A further aspect of the present disclosure relates to methods of producing the genetically altered plant of any one of the preceding embodiments, including genetically editing a gene encoding an endogenous LysM receptor polypeptide in the plant to include the modified LysM1 domain. An additional embodiment of this aspect includes the endogenous LysM receptor polypeptide being an endogenous chitin LysM receptor polypeptide or an endogenous Nod factor LysM receptor polypeptide. Yet another embodiment of this aspect, which may be combined with any one of the preceding embodiments, includes the modified LysM receptor polypeptide being generated by: (a) providing a heterologous Nod factor LysM receptor polypeptide model including a structural model, a molecular model, a surface characteristics model, and/or an electrostatic potential model of a LysM1 domain, a LysM2 domain, a LysM3 domain, any combination thereof, or the ectodomain of the heterologous Nod factor LysM receptor polypeptide having selectivity for a beneficial nitrogen-fixing bacteria or a beneficial mycorrhizal fungus and an unmodified endogenous LysM receptor polypeptide; (b) identifying a first motif, a second motif, and/or optionally a fifth motif for modification in the unmodified endogenous LysM receptor polypeptide by comparing a LysM1 domain of the unmodified endogenous LysM receptor polypeptide with the corresponding LysM1 domain of the heterologous Nod factor LysM receptor polypeptide model; (c) modifying the first motif by substituting at least one, at least two, or at least three amino acid residues in the first motif with corresponding amino acid residues that are different in a third motif, modifying the second motif by substituting at least one, at least two, or at least three amino acid residues in the second motif with corresponding amino acid residues that are different in a fourth motif, and/or optionally modifying the fifth motif by substituting at least one, at least two, or at least three amino acid residues in the fifth motif with corresponding amino acid residues that are different in a sixth motif, wherein the third motif, the fourth motif, and the sixth motif have different affinities, selectivities, and/or specificities for oligosaccharides than the first motif, the second motif, and the fifth motif; and (d) generating the modified endogenous LysM receptor polypeptide wherein the first motif, the second motif, and/or optionally the fifth motif have been substituted with corresponding amino acid residues from the third motif, the fourth motif, and/or optionally the sixth motif. Still another embodiment of this aspect includes genetically editing a gene encoding an endogenous LysM receptor polypeptide using one or more gene editing components being selected from the group of a ribonucleoprotein complex; a TALEN protein; a ZFN protein; an oligonucleotide donor (ODN); or a CRISPR/Cas enzyme and a targeting sequence. A further embodiment of this aspect that can be combined with any of the preceding embodiments includes a plant or plant part produced by the method of any one of the preceding embodiments.

[0082] In some aspects, the present disclosure relates to a method of producing a genetically altered plant of any one of the preceding embodiments, including the steps of: introducing a genetic alteration to the plant including the provision of an ability for Nod factors produced by nitrogen-fixing bacteria and/or mycorrhizal fungi to be recognized, thereby enabling the plant to recognize Nod factors. In yet another embodiment of this aspect, the provision of an ability for Nod factors produced by nitrogen-fixing bacteria and/or mycorrhizal fungi to be recognized results in Nod factors produced by nitrogen-fixing bacteria and/or mycorrhizal fungi being recognized with higher affinity, higher selectivity, and/or higher specificity as compared to an unmodified plant, thereby enabling the modified plant to recognize Nod factors with high affinity, high selectivity, and/or high specificity.

[0083] In some aspects, the present disclosure relates to methods of producing a genetically altered plant of any one of the preceding embodiments, including the steps of: introducing a genetic alteration to the plant including the provision of an ability for Nod factors produced by the specific nitrogen-fixing bacterial species and/or the specific mycorrhizal fungal species to be recognized with altered specificity, thereby enabling the plant to recognize Nod factors with altered specificity. In some embodiments, the genetic alteration allows the genetically altered plant to recognize a different specific nitrogen-fixing bacterial species and/or specific mycorrhizal fungal species as compared to a plant without the genetic alteration. An additional embodiment of this aspect includes the genetically altered plant being able to be grown in different agricultural conditions (e.g., different soils containing different symbiotic microbial species, etc.). Yet another embodiment of this aspect includes the genetic alteration allowing the genetically altered plant to be grown in different agricultural conditions containing specific bacterial strains producing Nod factors detected with high specificity, sensitivity, and/or selectivity by the genetically altered plant. A further embodiment of this aspect includes the bacterial strains being added as a seed coating, a soil inoculum, or applied as a spray. Still another embodiment of this aspect includes the genetically altered plant being able to be grown with different crop species (e.g., different crop rotations, etc.).

[0084] In some aspects, the present disclosure relates to methods of cultivating the genetically altered plant of any one of the preceding embodiments, including the steps of: cultivating the plant under conditions where the ability to recognize Nod factors produced by nitrogen-fixing bacteria and/or mycorrhizal fungi results with altered specificity, high affinity, high selectivity, and/or high specificity in increased growth, yield, and/or biomass, as compared to a plant grown under the same conditions that lacks the one or more genetic alterations. An additional embodiment of this aspect includes the plant being cultivated in nutrient-poor soil. In some embodiments, the genetic alteration allows the genetically altered plant to recognize a different specific nitrogen-fixing bacterial species and/or specific mycorrhizal fungal species as compared to a plant without the genetic alteration. Yet another embodiment of this aspect includes the genetically altered plant being able to be grown in different agricultural conditions (e.g., different soils containing different symbiotic microbial species, etc.). Still another embodiment of this aspect includes the genetically altered plant being able to be grown with different crop species (e.g., different crop rotations, etc.).

[0085] In additional embodiments of any of the above methods, the ability to recognize Nod factors is conferred by a modified plant LysM receptor of any one of the embodiments described in the section “Modified plant LysM receptors”. In yet further embodiments of any of the above methods, the modified plant LysM receptor has altered specificity for Nod factors than the unmodified plant LysM receptor and the expression of the modified plant LysM receptor allows the plant or part thereof to recognize different Nod factors than a plant with an unmodified LysM receptor. In further embodiments of any of the above methods, the modified plant LysM receptor has higher affinity, selectivity, and/or specificity for Nod factors than the unmodified plant LysM receptor and the expression of the modified plant LysM receptor allows the plant or part thereof to recognize Nod factors with high affinity, selectivity, and/or specificity.

[0086] Still another aspect of the present disclosure relates to methods of cultivating the genetically altered plant of any one of the preceding embodiments, including the steps of: (a) planting a genetically altered seedling, a genetically altered plantlet, a genetically altered cutting, a genetically altered tuber, a genetically altered root, or a genetically altered seed in soil to produce the genetically altered plant or grafting the genetically altered seedling, the genetically altered plantlet, or the genetically altered cutting to a root stock or a second plant grown in soil to produce the genetically altered plant; (b) cultivating the plant to produce harvestable seed, harvestable leaves, harvestable roots, harvestable cuttings, harvestable wood, harvestable fruit, harvestable kernels, harvestable tubers, and/or harvestable grain; and (c) harvesting the harvestable seed, harvestable leaves, harvestable roots, harvestable cuttings, harvestable wood, harvestable fruit, harvestable kernels, harvestable tubers, and/or harvestable grain.

### Molecular Biological Methods to Produce Genetically Altered Plants and Plant Cells

[0087] One embodiment of the present invention provides a genetically altered plant or plant cell containing a modified plant LysM receptor. For example, the present disclosure provides a genetically altered plant or plant part with modified LysM receptors with modified and/or replaced motifs in region II, region IV, and optionally region III of the LysM1 domain. Another embodiment of the present disclosure provides a genetically altered plant or plant part with modified LysM receptors including LysM1 domain modifications as well as a LysM2 domain modified to include a hydrophobic patch or alter the hydrophobic patch in the LysM2 domain. An additional embodiment of the present disclosure provides a genetically altered plant or plant part with a first modified LysM receptor including LysM1 domain modifications and a second modified LysM receptor including LysM2 domain modifications. Plants with these modified receptors can have altered specificity for Nod factors, and/or increased affinity, selectivity, and/or specificity for Nod factors.

[0088] Certain aspects of the present disclosure relate to modified plant LysM receptors, including LysM chitin receptors (i.e., LysM CO receptors), modified LysM Nod factor receptors (i.e., LysM LCO receptors), and/or modified high affinity LysM Nod factor receptors (i.e., high affinity LysM Nod factor receptors). LysM receptors have an ectodomain, which contains three characteristic domains located in the ectodomain of the protein: LysM1, LysM2, and LysM3, which are present in this order on the protein sequence and separated by CxC motifs. The LysM1 domain is located toward the N-terminal end of the protein sequence, and is preceded by an N-terminal signal peptide. The three LysM domains are shown in FIGS. 14A and 15A that show alignments of the ectodomains of NFR1-type LysM Nod factor receptors and CERK6-type LysM chitin receptors, respectively. Moreover, as shown in FIG. 20D, the structure of different LysM receptor types is conserved. The category of plant LysM receptors is therefore known by one of skill in the art.

[0089] There are four regions within the LysM1 domain (I-IV), three of which (II-IV, shown in FIG. 14A) are important for oligosaccharide (e.g., chitin (CO), Nod factor (LCO), etc.) recognition. Each of these regions important for oligosaccharide recognition further contains specific minimal motifs. The motif in region II (motif II) corresponds to amino acids 42-48 of SEQ ID NO: 162 when aligned to SEQ ID NO: 162, amino acids 44-49 of SEQ ID NO: 164 when aligned to SEQ ID NO: 164, or amino acids 41-46 of SEQ ID NO: 163 when aligned to SEQ ID NO: 163. The motif in region IV (motif IV) corresponds to amino acids 75-80 of SEQ ID NO: 162 when aligned to SEQ ID NO: 162, amino acids 76-81 of SEQ ID NO: 164 when aligned to SEQ ID NO: 164, or amino acids 75-80 of SEQ ID NO: 163 when aligned to SEQ ID NO: 163. The motif in region III (motif III) corresponds to amino acids 56-65 of SEQ ID NO: 162 when aligned to SEQ ID NO: 162 or amino acids 54-65 of SEQ ID NO: 163 when aligned to SEQ ID NO: 163. In LysM chitin receptors (e.g., L. japonicus CERK6), the motifs in region II and region IV are conserved (FIGS. 15D-15E). The flanking regions in region II and region IV (i.e., amino acids within regions II and IV that are not in the motifs within regions II and IV (not in motifs II and IV)) correspond to amino acids 41, 49-52, 73-74, and 81 of SEQ ID NO: 162 when aligned to SEQ ID NO: 162, amino acids 47-53, 66-74, and 81-82 of SEQ ID NO: 163 when aligned to SEQ ID NO: 163, and/or amino acids 43, 50-53, 74-75, and 82 of SEQ ID NO: 164 when aligned to SEQ ID NO: 164. Without wishing to be bound by theory, it is thought that these motifs are characteristic of LysM chitin receptors. In LysM Nod factor receptors, the motifs in region II, region III, and region IV are variable (FIGS. 14D-14E). It is thought that this variability may be linked to the variability in Nod factor structure features recognized (see Tables 4-5). Further, and without wishing to be bound by theory, motifs in region III appear to confer Nod factor recognition specificity, but motifs in region III are not required for all LysM Nod factor receptors to specifically recognize their cognate Nod factors.

[0090] In LysM Nod factor receptors, the LysM2 domain contains a hydrophobic patch. FIG. 18B shows M. truncatula NFP shaded with electrostatic surface potential, in which the hydrophobic patch in the LysM2 domain is circled by a dashed black line, and the locations of important residues L147 and L154 are shown using arrows. FIG. 19A shows the hydrophobic patch on L. japonicus LYS11 model and crystal structure. Without wanting to be limited to theory, it is believed that this hydrophobic patch confers selective recognition of Nod factors (LCOs) over chitins (COs), and that therefore LysM receptors with the hydrophobic patch have increased selectivity as compared to LysM receptors without the hydrophobic patch. LysM receptors with a hydrophobic patch in the LysM2 domain may also provide specificity for specific Nod factors.

[0091] A modified plant LysM receptor of the present disclosure includes a plant LysM receptor including a modified LysM1 domain in which at least one, at least two, or at least three amino acid residues motifs in region II, region IV, and optionally region III have been modified or in which the motifs in region II, region IV, and optionally region III have been substituted. Sequences of motifs in region II (motif II sequences) include SEQ ID NO: 1, SEQ ID NO: 2, SEQ ID NO: 3, SEQ ID NO: 4, SEQ ID NO: 5, SEQ ID NO: 6, SEQ ID NO: 7, SEQ ID NO: 8, SEQ ID NO: 9, SEQ ID NO: 10, SEQ ID NO: 11, SEQ ID NO: 12, SEQ ID NO: 13, SEQ ID NO: 14, SEQ ID NO: 15, SEQ ID NO: 16, SEQ ID NO: 17, SEQ ID NO: 18, SEQ ID NO: 19, SEQ ID NO: 20, SEQ ID NO: 21, SEQ ID NO: 22, SEQ ID NO: 23, SEQ ID NO: 24, SEQ ID NO: 25, SEQ ID NO: 26, SEQ ID NO: 53, SEQ ID NO: 54, SEQ ID NO: 55, SEQ ID NO: 59, SEQ ID NO: 60, SEQ ID NO: 61, SEQ ID NO: 62, SEQ ID NO: 63, SEQ ID NO: 64, SEQ ID NO: 65, SEQ ID NO: 66, SEQ ID NO: 67, SEQ ID NO: 68, SEQ ID NO: 79, SEQ ID NO: 80, SEQ ID NO: 81, SEQ ID NO: 82, SEQ ID NO: 83, SEQ ID NO: 84, SEQ ID NO: 85, SEQ ID NO: 86, SEQ ID NO: 87, SEQ ID NO: 88, SEQ ID NO: 89, SEQ ID NO: 90, SEQ ID NO: 91, SEQ ID NO: 92, SEQ ID NO: 93, SEQ ID NO: 94, SEQ ID NO: 95, SEQ ID NO: 96, SEQ ID NO: 97, SEQ ID NO: 98, SEQ ID NO: 99, SEQ ID NO: 143, or SEQ ID NO: 341. Sequences of motifs in region IV (motif IV sequences) include SEQ ID NO: 27, SEQ ID NO: 28, SEQ ID NO: 29, SEQ ID NO: 30, SEQ ID NO: 31, SEQ ID NO: 32, SEQ ID NO: 33, SEQ ID NO: 34, SEQ ID NO: 35, SEQ ID NO: 36, SEQ ID NO: 37, SEQ ID NO: 38, SEQ ID NO: 39, SEQ ID NO: 40, SEQ ID NO: 41, SEQ ID NO: 42, SEQ ID NO: 43, SEQ ID NO: 44, SEQ ID NO: 45, SEQ ID NO: 46, SEQ ID NO: 47, SEQ ID NO: 48, SEQ ID NO: 49, SEQ ID NO: 50, SEQ ID NO: 51, SEQ ID NO: 52, SEQ ID NO: 56, SEQ ID NO: 57, SEQ ID NO: 58, SEQ ID NO: 69, SEQ ID NO: 70, SEQ ID NO: 71, SEQ ID NO: 72, SEQ ID NO: 73, SEQ ID NO: 74, SEQ ID NO: 75, SEQ ID NO: 76, SEQ ID NO: 77, SEQ ID NO: 78, SEQ ID NO: 121, SEQ ID NO: 122, SEQ ID NO: 123, SEQ ID NO: 124, SEQ ID NO: 125, SEQ ID NO: 126, SEQ ID NO: 127, SEQ ID NO: 128, SEQ ID NO: 129, SEQ ID NO: 130, SEQ ID NO: 131, SEQ ID NO: 132, SEQ ID NO: 133, SEQ ID NO: 134, SEQ ID NO: 135, SEQ ID NO: 136, SEQ ID NO: 137, SEQ ID NO: 138, SEQ ID NO: 139, SEQ ID NO: 140, SEQ ID NO: 141, or SEQ ID NO: 142. Sequences of motifs in region III (motif III sequences) include SEQ ID NO: 100, SEQ ID NO: 101, SEQ ID NO: 102, SEQ ID NO: 103, SEQ ID NO: 104, SEQ ID NO: 105, SEQ ID NO: 106, SEQ ID NO: 107, SEQ ID NO: 108, SEQ ID NO: 109, SEQ ID NO: 110, SEQ ID NO: 111, SEQ ID NO: 112, SEQ ID NO: 113, SEQ ID NO: 114, SEQ ID NO: 115, SEQ ID NO: 116, SEQ ID NO: 117, SEQ ID NO: 118, SEQ ID NO: 119, or SEQ ID NO: 120.

[0092] Further, a modified plant LysM receptor of the present disclosure includes a plant LysM receptor including a LysM2 domain modified to comprise a hydrophobic patch on the surface of the LysM2 domain. Methods of selecting a target plant LysM receptor and modifying the LysM2 domain of the same are described in Example 9 below, and disclosed in U.S. Prov. App. No. 62/718,282 and PCT App. No. PCT/EP2019/071705, published as WO 2020/035488, both of which are hereby incorporated by reference. The modified plant LysM receptors of the present disclosure may be used to produce the genetically altered plant of any one of the above embodiments relating to plants as described in the section “Genetically altered plants and parts thereof”.

[0093] Transformation and generation of genetically altered monocotyledonous and dicotyledonous plant cells is well known in the art. See, e.g., Weising, et al., Ann. Rev. Genet. 22:421-477 (1988); U.S. Pat. No. 5,679,558; Agrobacterium Protocols, ed: Gartland, Humana Press Inc. (1995); and Wang, et al. Acta Hort. 461:401-408 (1998). The choice of method varies with the type of plant to be transformed, the particular application and/or the desired result. The appropriate transformation technique is readily chosen by the skilled practitioner.

[0094] Any methodology known in the art to delete, insert or otherwise modify the cellular DNA (e.g., genomic DNA and organelle DNA) can be used in practicing the inventions disclosed herein. For example, a disarmed Ti plasmid, containing a genetic construct for deletion or insertion of a target gene, in Agrobacterium tumefaciens can be used to transform a plant cell, and thereafter, a transformed plant can be regenerated from the transformed plant cell using procedures described in the art, for example, in EP 0116718, EP 0270822, PCT publication WO 84/02913 and published European Patent application (“EP”) 0242246. Ti-plasmid vectors each contain the gene between the border sequences, or at least located to the left of the right border sequence, of the T-DNA of the Ti-plasmid. Of course, other types of vectors can be used to transform the plant cell, using procedures such as direct gene transfer (as described, for example in EP 0233247), pollen mediated transformation (as described, for example in EP 0270356, PCT publication WO 85/01856, and U.S. Pat. No. 4,684,611), plant RNA virus-mediated transformation (as described, for example in EP 0 067 553 and U.S. Pat. No. 4,407,956), liposome-mediated transformation (as described, for example in U.S. Pat. No. 4,536,475), and other methods such as the methods for transforming certain lines of corn (e.g., U.S. Pat. No. 6,140,553; Fromm et al., Bio/Technology (1990) 8, 833 839); Gordon-Kamm et al., The Plant Cell, (1990) 2, 603 618) and rice (Shimamoto et al., Nature, (1989) 338, 274 276; Datta et al., Bio/Technology, (1990) 8, 736 740) and the method for transforming monocots generally (PCT publication WO 92/09696). For cotton transformation, the method described in PCT patent publication WO 00/71733 can be used. For soybean transformation, reference is made to methods known in the art, e.g., Hinchee et al. (Bio/Technology, (1988) 6, 915) and Christou et al. (Trends Biotech, (1990) 8, 145) or the method of WO 00/42207.

[0095] Genetically altered plants of the present invention can be used in a conventional plant breeding scheme to produce more genetically altered plants with the same characteristics, or to introduce the genetic alteration(s) in other varieties of the same or related plant species. Seeds, which are obtained from the altered plants, preferably contain the genetic alteration(s) as a stable insert in chromosomal or organelle DNA or as modifications to an endogenous gene or promoter. Plants comprising the genetic alteration(s) in accordance with the invention include plants comprising, or derived from, root stocks of plants comprising the genetic alteration(s) of the invention, e.g., fruit trees or ornamental plants. Hence, any non-transgenic grafted plant parts inserted on a transformed plant or plant part are included in the invention.

[0096] Introduced genetic elements, whether in an expression vector or expression cassette, which result in the expression of an introduced gene will typically utilize a plant-expressible promoter. A ‘plant-expressible promoter’ as used herein refers to a promoter that ensures expression of the genetic alteration(s) of the invention in a plant cell. Examples of promoters directing constitutive expression in plants are known in the art and include: the strong constitutive 35S promoters (the “35S promoters”) of the cauliflower mosaic virus (CaMV), e.g., of isolates CM 1841 (Gardner et al., Nucleic Acids Res, (1981) 9, 2871 2887), CabbB S (Franck et al., Cell (1980) 21, 285 294) and CabbB JI (Hull and Howell, Virology, (1987) 86, 482 493); promoters from the ubiquitin family (e.g., the maize ubiquitin promoter of Christensen et al., Plant Mol Biol, (1992) 18, 675-689), the gos2 promoter (de Pater et al., The Plant J (1992) 2, 834-844), the emu promoter (Last et al., Theor Appl Genet, (1990) 81, 581-588), actin promoters such as the promoter described by An et al. (The Plant J, (1996) 10, 107), the rice actin promoter described by Zhang et al. (The Plant Cell, (1991) 3, 1155-1165); promoters of the Cassava vein mosaic virus (WO 97/48819, Verdaguer et al. (Plant Mol Biol, (1998) 37, 1055-1067), the pPLEX series of promoters from Subterranean Clover Stunt Virus (WO 96/06932, particularly the S4 or S7 promoter), an alcohol dehydrogenase promoter, e.g., pAdh1S (GenBank accession numbers X04049, X00581), and the TR1′ promoter and the TR2′ promoter (the “TR1′ promoter” and “TR2′ promoter”, respectively) which drive the expression of the 1′ and 2′ genes, respectively, of the T DNA (Velten et al., EMBO J, (1984) 3, 2723 2730).

[0097] Alternatively, a plant-expressible promoter can be a tissue-specific promoter, i.e., a promoter directing a higher level of expression in some cells or tissues of the plant, e.g., in root epidermal cells or root cortex cells. In preferred embodiments, LysM receptor promoters will be used. Non-limiting examples include NFR1 promoters, NFR5/NFP promoters, LYK3 promoters, CERK6 promoters, NFR5/NFP promoters, the Lotus japonicus NFR5 promoter (SEQ ID NO: 261), the Lotus japonicus NFR1 promoter (SEQ ID NO: 261), the Lotus japonicus CERK6 promoter (SEQ ID NO: 264), the Medicago truncatula NFP promoter (SEQ ID NO: 263), and the Medicago truncatula LYK3 promoter (SEQ ID NO: 262). In additional preferred embodiments, root specific promoters will be used. Non-limiting examples include the promoter of the maize allothioneine (DE FRAMOND et al, FEBS 290, 103.-106, 1991 Application EP 452269), the chitinase promoter (SAMAC et al. Plant Physiol 93, 907-914, 1990), the glutamine synthetase soybean root promoter (HIREL et al. Plant Mol. Biol. 20, 207-218, 1992), the RCC3 promoter (PCT Application WO 2009/016104), the rice antiquitine promoter (PCT Application WO 2007/076115), the LRR receptor kinase promoter (PCT application WO 02/46439), the maize ZRP2 promoter (U.S. Pat. No. 5,633,363), the tomato LeExtl promoter (Bucher et al. Plant Physiol. 128, 911-923, 2002), and the Arabidopsis pCO2 promoter (HEIDSTRA et al, Genes Dev. 18, 1964-1969, 2004). These plant promoters can be combined with enhancer elements, they can be combined with minimal promoter elements, or can comprise repeated elements to ensure the expression profile desired.

[0098] Examples of constitutive promoters that are often used in plant cells are the cauliflower mosaic (CaMV) 35S promoter (KAY et al. Science, 236, 4805, 1987), and various derivatives of the promoter, virus promoter vein mosaic cassava (International Application WO 97/48819), the maize ubiquitin promoter (CHRISTENSEN & QUAIL, Transgenic Res, 5, 213-8, 1996), trefoil (Ljubql, MAEKAWA et al. Mol Plant Microbe Interact. 21, 375-82, 2008) and Arabidopsis UBQ10 (Norris et al. Plant Mol. Biol. 21, 895-906, 1993).

[0099] In some embodiments, genetic elements to increase expression in plant cells can be utilized. For example, an intron at the 5′ end or 3′ end of an introduced gene, or in the coding sequence of the introduced gene, e.g., the hsp70 intron. Other such genetic elements can include, but are not limited to, promoter enhancer elements, duplicated or triplicated promoter regions, 5′ leader sequences different from another transgene or different from an endogenous (plant host) gene leader sequence, 3′ trailer sequences different from another transgene used in the same plant or different from an endogenous (plant host) trailer sequence.

[0100] An introduced gene of the present invention can be inserted in host cell DNA so that the inserted gene part is upstream (i.e., 5′) of suitable 3′ end transcription regulation signals (e.g., transcript formation and polyadenylation signals). This is preferably accomplished by inserting the gene in the plant cell genome (nuclear or chloroplast). Preferred polyadenylation and transcript formation signals include those of the nopaline synthase gene (Depicker et al., J. Molec Appl Gen, (1982) 1, 561-573), the octopine synthase gene (Gielen et al., EMBO J, (1984) 3:835 845), the SCSV or the Malic enzyme terminators (Schunmann et al., Plant Funct Biol, (2003) 30:453-460), and the T DNA gene 7 (Velten and Schell, Nucleic Acids Res, (1985) 13, 6981 6998), which act as 3′ untranslated DNA sequences in transformed plant cells. In some embodiments, one or more of the introduced genes are stably integrated into the nuclear genome. Stable integration is present when the nucleic acid sequence remains integrated into the nuclear genome and continues to be expressed (e.g., detectable mRNA transcript or protein is produced) throughout subsequent plant generations. Stable integration into and/or editing of the nuclear genome can be accomplished by any known method in the art (e.g., microparticle bombardment, Agrobacterium-mediated transformation, CRISPR/Cas9, electroporation of protoplasts, microinjection, etc.).

[0101] The term recombinant or modified nucleic acids refers to polynucleotides which are made by the combination of two otherwise separated segments of sequence accomplished by the artificial manipulation of isolated segments of polynucleotides by genetic engineering techniques or by chemical synthesis. In so doing one may join together polynucleotide segments of desired functions to generate a desired combination of functions.

[0102] As used herein, the terms “overexpression” and “upregulation” refer to increased expression (e.g., of mRNA, polypeptides, etc.) relative to expression in a wild type organism (e.g., plant) as a result of genetic modification. In some embodiments, the increase in expression is a slight increase of about 10% more than expression in wild type. In some embodiments, the increase in expression is an increase of 50% or more (e.g., 60%, 70%, 80%, 100%, etc.) relative to expression in wild type. In some embodiments, an endogenous gene is overexpressed. In some embodiments, an exogenous gene is overexpressed by virtue of being expressed. Overexpression of a gene in plants can be achieved through any known method in the art, including but not limited to, the use of constitutive promoters, inducible promoters, high expression promoters (e.g., PsaD promoter), enhancers, transcriptional and/or translational regulatory sequences, codon optimization, modified transcription factors, and/or mutant or modified genes that control expression of the gene to be overexpressed.

[0103] Where a recombinant nucleic acid is intended for expression, cloning, or replication of a particular sequence, DNA constructs prepared for introduction into a host cell will typically comprise a replication system (e.g. vector) recognized by the host, including the intended DNA fragment encoding a desired polypeptide, and can also include transcription and translational initiation regulatory sequences operably linked to the polypeptide-encoding segment. Additionally, such constructs can include cellular localization signals (e.g., plasma membrane localization signals). In preferred embodiments, such DNA constructs are introduced into a host cell's genomic DNA, chloroplast DNA or mitochondrial DNA.

[0104] In some embodiments, a non-integrated expression system can be used to induce expression of one or more introduced genes. Expression systems (expression vectors) can include, for example, an origin of replication or autonomously replicating sequence (ARS) and expression control sequences, a promoter, an enhancer and necessary processing information sites, such as ribosome-binding sites, RNA splice sites, polyadenylation sites, transcriptional terminator sequences, and mRNA stabilizing sequences. Signal peptides can also be included where appropriate from secreted polypeptides of the same or related species, which allow the protein to cross and/or lodge in cell membranes, cell wall, or be secreted from the cell.

[0105] Selectable markers useful in practicing the methodologies of the invention disclosed herein can be positive selectable markers. Typically, positive selection refers to the case in which a genetically altered cell can survive in the presence of a toxic substance only if the recombinant polynucleotide of interest is present within the cell. Negative selectable markers and screenable markers are also well known in the art and are contemplated by the present invention. One of skill in the art will recognize that any relevant markers available can be utilized in practicing the inventions disclosed herein.

[0106] Screening and molecular analysis of recombinant strains of the present invention can be performed utilizing nucleic acid hybridization techniques. Hybridization procedures are useful for identifying polynucleotides, such as those modified using the techniques described herein, with sufficient homology to the subject regulatory sequences to be useful as taught herein. The particular hybridization techniques are not essential to the subject invention. As improvements are made in hybridization techniques, they can be readily applied by one of skill in the art. Hybridization probes can be labeled with any appropriate label known to those of skill in the art. Hybridization conditions and washing conditions, for example temperature and salt concentration, can be altered to change the stringency of the detection threshold. See, e.g., Sambrook et al. (1989) vide infra or Ausubel et al. (1995) Current Protocols in Molecular Biology, John Wiley & Sons, NY, N.Y., for further guidance on hybridization conditions.

[0107] Additionally, screening and molecular analysis of genetically altered strains, as well as creation of desired isolated nucleic acids can be performed using Polymerase Chain Reaction (PCR). PCR is a repetitive, enzymatic, primed synthesis of a nucleic acid sequence. This procedure is well known and commonly used by those skilled in this art (see Mullis, U.S. Pat. Nos. 4,683,195, 4,683,202, and 4,800,159; Saiki et al. (1985) Science 230:1350-1354). PCR is based on the enzymatic amplification of a DNA fragment of interest that is flanked by two oligonucleotide primers that hybridize to opposite strands of the target sequence. The primers are oriented with the 3′ ends pointing towards each other. Repeated cycles of heat denaturation of the template, annealing of the primers to their complementary sequences, and extension of the annealed primers with a DNA polymerase result in the amplification of the segment defined by the 5′ ends of the PCR primers. Because the extension product of each primer can serve as a template for the other primer, each cycle essentially doubles the amount of DNA template produced in the previous cycle. This results in the exponential accumulation of the specific target fragment, up to several million-fold in a few hours. By using a thermostable DNA polymerase such as the Taq polymerase, which is isolated from the thermophilic bacterium Thermus aquaticus, the amplification process can be completely automated. Other enzymes which can be used are known to those skilled in the art.

[0108] Nucleic acids and proteins of the present invention can also encompass homologues of the specifically disclosed sequences. Homology (e.g., sequence identity) can be 50%-100%. In some instances, such homology is greater than 80%, greater than 85%, greater than 90%, or greater than 95%. The degree of homology or identity needed for any intended use of the sequence(s) is readily identified by one of skill in the art. As used herein percent sequence identity of two nucleic acids is determined using an algorithm known in the art, such as that disclosed by Karlin and Altschul (1990) Proc. Natl. Acad. Sci. USA 87:2264-2268, modified as in Karlin and Altschul (1993) Proc. Natl. Acad. Sci. USA 90:5873-5877. Such an algorithm is incorporated into the NBLAST and)(BLAST programs of Altschul et al. (1990) J. Mol. Biol. 215:402-410. BLAST nucleotide searches are performed with the NBLAST program, score=100, wordlength=12, to obtain nucleotide sequences with the desired percent sequence identity. To obtain gapped alignments for comparison purposes, Gapped BLAST is used as described in Altschul et al. (1997) Nucl. Acids. Res. 25:3389-3402. When utilizing BLAST and Gapped BLAST programs, the default parameters of the respective programs (NBLAST and)(BLAST) are used. See www.ncbi.nih.gov.

[0109] Preferred host cells are plant cells. Recombinant host cells, in the present context, are those which have been genetically modified to contain an isolated nucleic molecule, contain one or more deleted or otherwise non-functional genes normally present and functional in the host cell, or contain one or more genes to produce at least one recombinant protein. The nucleic acid(s) encoding the protein(s) of the present invention can be introduced by any means known to the art which is appropriate for the particular type of cell, including without limitation, transformation, lipofection, electroporation or any other methodology known by those skilled in the art.

[0110] “Isolated”, “isolated DNA molecule” or an equivalent term or phrase is intended to mean that the DNA molecule or other moiety is one that is present alone or in combination with other compositions, but altered from or not within its natural environment. For example, nucleic acid elements such as a coding sequence, intron sequence, untranslated leader sequence, promoter sequence, transcriptional termination sequence, and the like, that are naturally found within the DNA of the genome of an organism are not considered to be “isolated” so long as the element is within the genome of the organism and at the location within the genome in which it is naturally found. However, each of these elements, and subparts of these elements, would be “isolated” from its natural setting within the scope of this disclosure so long as the element is not within the genome of the organism in which it is naturally found, the element is altered from its natural form, or the element is not at the location within the genome in which it is naturally found. Similarly, a nucleotide sequence encoding a protein or any naturally occurring variant of that protein would be an isolated nucleotide sequence so long as the nucleotide sequence was not within the DNA of the organism from which the sequence encoding the protein is naturally found in its natural location or if that nucleotide sequence was altered from its natural form. A synthetic nucleotide sequence encoding the amino acid sequence of the naturally occurring protein would be considered to be isolated for the purposes of this disclosure. For the purposes of this disclosure, any transgenic nucleotide sequence, i.e., the nucleotide sequence of the DNA inserted into the genome of the cells of a plant, alga, fungus, or bacterium, or present in an extrachromosomal vector, would be considered to be an isolated nucleotide sequence whether it is present within the plasmid or similar structure used to transform the cells, within the genome of the plant or bacterium, or present in detectable amounts in tissues, progeny, biological samples or commodity products derived from the plant or bacterium.

[0111] Having generally described this invention, the same will be better understood by reference to certain specific examples, which are included herein to further illustrate the invention and are not intended to limit the scope of the invention as defined by the claims.

### EXAMPLES

[0112] The present disclosure is described in further detail in the following examples which are not in any way intended to limit the scope of the disclosure as claimed. The attached figures are meant to be considered as integral parts of the specification and description of the disclosure. The following examples are offered to illustrate, but not to limit the claimed disclosure.

### Example 1: Identification of LysM Receptor Kinase Domains Necessary for Nodulation and CO8-Induced Immune Responses

[0113] The following example describes the identification of domains of the Lotus japonicus LysM receptor kinases NFR1 and CERK6 required for nodulation and CO8-induced immune responses. Further, experiments to determine which of the three LysM domains in the ectodomain of NFR1 and CERK6 determine ligand specificity are described.

### Materials and Methods

### Plant Lines and Growth Conditions

[0114] The Lotus japonicus Gifu ecotype background was used. The LORE1 insertion DK09-030067625 (cerk6-1) mutant line and the Lj2g3v2904690.1 (nfr1-1) mutant line containing the proNin-GUS construct (nfr1-1_pNin-gus; Radutoiu S. et al. Nature 2003 425(6958): 585-92) were used for ROS and nodulation assays, respectively (Bozsoki, Z. et al. Proc. Natl. Acad. Sci. 2017 114: E8118-E8127).

[0115] Nicotiana benthamiana was used for transient expression and localization studies (FIGS. 3A-3B).

[0116] All plants were grown at 21° C. under 16 hour light/8 hour dark conditions. For germination, L. japonicus seeds were scarified with sandpaper and surface sterilized for 10 minutes with 1% sodium hypochlorite. Seedlings were germinated on wet filter paper (AGF 651; Frisenette ApS) in an upright position in sterile square Petri dishes at 21° C. for two days. Then, seedlings were transferred to slanted agar plates solidified with 0.8% Gelrite (Duchefa Biochemie) supplemented with ½ Gamborg's B5 nutrient solution (Duchefa Biochemie).

### Bacterial Strains and Culture Conditions

[0117] Chemically competent E. coli TOP10 (ThermoFisherScientific) were used for molecular cloning and were grown in LB medium at 37° C.

[0118] Mesorhizobium loti strain R7A constitutively expressing the fluorescent protein DsRed (Kelly, S. J. et al. Mol Plant Microbe Interact 2013 26: 319-329) was grown in TY/YMB medium at 28° C.

[0119] Agrobacterium rhizogenes strain AR1193 (Stougaard, J. Methods Mol Biol 1995 49:49-61) was used for all hairy root transformation experiments and Agrobacterium tumefaciens strain AGL1 was used for transient transformation of N. benthamiana. Both Agrobacterium strains were cultured in LB medium at 28° C.

### Generation of Plant Expression Vectors

[0120] For hairy root transformation of L. japonicus, the pIV10 expression vector (Hansen, J. et al. Plant Cell Rep 1989 8: 12-15) was used. This expression vector contains a sequence encoding triple YFP fused to a nuclear localization signal (pIV10_tYFP-NLS) that serves as a transformation control.

[0121] Expression constructs were generated to express LysM receptor kinases in L. japonicus (FIG. 1D). LysM receptor kinase coding sequences were placed under control of the L. japonicus Nfr1 (SEQ ID NO: 261) or Cerk6 promoters (SEQ ID NO: 264). Plasmids containing gene fragments encoding the respective domains or regions of L. japonicus NFR1 and L. japonicus CERK6 were assembled with the appropriate promoter and cloned into the pIV10_tYFP-NLS expression vector via Golden Gate cloning (FIG. 1D; Engler, C. et al. PLoS One 2008 3: e3647). Expression constructs were generated to express NFR1, CERK6, chimeric alleles of NFR1 and CERK6, or alleles of NFR1 and CERK6 with point mutations (see FIGS. 1A-1E, FIG. 4A). Chimeric alleles of LysM receptor kinases were designed based on their modular structure, which has, from N to C terminus, an extracellular region also known as the ectodomain (“EC”) made up of three LysM domains (LysM1, LysM2, and LysM3), a transmembrane segment and an intracellular region with a juxtamembrane segment (“TJ”), and a kinase domain (“KD”), as shown in FIG. 1A and FIG. 4A.

[0122] Schematic diagrams showing the domain structure of NFR1 and CERK6, including the amino acid boundaries used for the purpose of swapping domains to generate chimeric proteins, are provided in FIG. 1A and FIG. 4A. As shown in FIG. 1A and FIG. 4A, the NFR1 TJ began at residue A226, and the KD began at residue L325. The CERK6 TJ began at residue G226, and the KD began at L325. As shown in FIG. 4A, the NFR1 LysM2 domain began at residue D91, and the LysM3 domain began at residue C152. The CERK6 LysM2 domain began at residue D92, and the LysM3 domain began at residue C153.

[0123] LysM receptor kinase expression constructs were assigned numerical labels that correspond to the schematic diagrams of the constructs presented in the FIGS. Table 1 provides a description of the LysM receptor kinase expression constructs used in this example.

TABLE 1
LysM receptor kinase expression constructs

| Con- | | | |
|---|---|---|---|
| struct | Pro- | Description of LysM Receptor | |
| Number | moter | Kinase | FIGS. |
| 1 | Nfr1 | NFR1 | FIGS. 2A-2B, |
| | | | 4B |
| 2 | Nfr1 | NFR1 with CERK6 TJ | FIGS. 2A-2B |
| 3 | Nfr1 | NFR1 with CERK6 KD | FIGS. 2A-2B |
| 4 | Nfr1 | NFR1 with CERK6 TJ and KD | FIGS. 2A-2B |
| 5 | Nfr1 | CERK6 | FIGS. 2A-2B |
| 6 | Nfr1 | CERK6 with NFR1 TJ | FIGS. 2A-2B |
| 7 | Nfr1 | CERK6 with NFR1 KD | FIGS. 2A-2B |
| 8 | Nfr1 | CERK6 with NFR1 TJ and KD | FIGS. 2A-2B |
| 9 | Cerk6 | NFR1 | FIG. 2C |
| 10 | Cerk6 | NFR1 with CERK6 TJ | FIG. 2C |
| 11 | Cerk6 | NFR1 with CERK6 KD | FIG. 2C |
| 12 | Cerk6 | NFR1 with CERK6 TJ and KD | FIGS. 2C, 6A |
| 13 | Cerk6 | CERK6 | FIGS. 2C, 6A |
| 14 | Cerk6 | CERK6 with NFR1 TJ | FIG. 2C |
| 15 | Cerk6 | CERK6 with NFR1 KD | FIG. 2C |
| 16 | Cerk6 | CERK6 with NFR1 TJ and KD | FIG. 2C |
| 17 | Nfr1 | NFR1 with CERK6 LysM3 | FIGS. 4B, 5A |
| 18 | Nfr1 | NFR1 with CERK6 LysM2 and | FIGS. 4B, 5A |
| | | LysM3 | |
| 19 | Nfr1 | NFR1 with CERK6 LysM2 | FIGS. 4B, 5A |
| 20 | Nfr1 | NFR1 with CERK6 LysM1 and | FIGS. 4B, 5A |
| | | LysM2 | |
| 21 | Nfr1 | NFR1 with CERK6 LysM1 | FIGS. 4B, 5A |
| 22 | Nfr1 | NFR1 with CERK6 LysM1 and | FIGS. 4B, 5A |
| | | LysM3 | |
| 23 | Nfr1 | NFR1 with I78W point mutation | FIGS. 4B, 5A |
| 24 | Nfr1 | NFR1 with I140W point mutation | FIGS. 4B, 5A |
| 25 | Cerk6 | CERK6 with NFR1 LysM1 and | FIG. 6A |
| | | LysM2 | |
| 26 | Cerk6 | CERK6 with NFR1 LysM1 | FIG. 6A |
| 27 | Cerk6 | CERK6 with NFR1 LysM1 and | FIG. 6A |
| | | LysM3 | |
| 28 | Cerk6 | CERK6 with NFR1 LysM3 | FIG. 6A |
| 29 | Cerk6 | CERK6 with NFR1 LysM2 and | FIG. 6A |
| | | LysM3 | |
| 30 | Cerk6 | CERK6 with NFR1 LysM2 | FIG. 6A |
| 31 | Cerk6 | CERK6 with V79W point mutation | FIG. 6A |
| 32 | Cerk6 | CERK6 with I141W point mutation | FIG. 6A |

[0124] To study the localization of LysM receptor kinases in N. benthamiana (tobacco) leaves (see FIGS. 3A-3B), Nfr1, Cerk6, or chimeric sequences were cloned downstream of the 35S promoter and upstream of the sequence encoding eYFP into a pICH binary vector (Weber, E. et al. PLoS One 2011 6) backbone containing a membrane-localized mCherry under control of the ubiquitin promoter (see FIG. 1E). The composition of the LysM receptor kinase coding sequences in FIGS. 3A-3B correspond to the numerical construct labels in Table 1. A summary of N. benthamiana LysM receptor kinase expression constructs is provided below in Table 2.

TABLE 2
N. benthamiana LysM receptor kinase expression constructs

| Corresponding | | | |
|---|---|---|---|
| Construct | Pro- | Description of LysM Receptor | |
| Numbers | moter | Kinase | FIGS. |
| 1 and 9 | 35S | NFR1 | FIG. 3A |
| 4 and 12 | 35S | NFR1 with CERK6 TJ and KD and | FIG. 3A |
| | | K351N point mutation | |
| 5 and 13 | 35S | CERK6 with K351N point mutation | FIG. 3A |
| 7 and 15 | 35S | CERK6 with NFR1 KD | FIG. 3A |
| 23 | 35S | NFR1 with I78W point mutation | FIG. 3B |
| 31 | 35S | CERK6 with V79W and K351N point | FIG. 3B |
| | | mutations | |
| 65 | 35S | CERK6 with NFR1 LysM1 regions | FIG. 3B |
| | | II and IV and K351N point mutation; | |
| | | see Example 5, below | |

[0125] Expression in N. benthamiana leaf cells of the YFP-tagged LysM receptor kinases with domain structures corresponding to constructs 4 and 12, 5 and 13, or 7 and 15 showed they were localized at the plasma membrane. This mirrored the protein synthesis and expression observed for full-length NFR1 (corresponding to constructs 1 and 9) or CERK6 (corresponding to constructs 5 and 13) YFP-tagged LysM receptor kinases (FIGS. 3A-3B). The constructs with CERK6 KDs contained K351N mutations in the KD that rendered the kinase inactive, thereby circumventing activation of cell death and enabling receptor localization.

### Hairy Root Transformation

[0126] A. rhizogenes carrying the expression constructs of interest were grown for two days on solid medium. The cells of one plate were resuspended in 2 ml YMB media, and this process was repeated for each construct. A 1 ml syringe with a needle (Sterican Ø0.40×20 mm) was then used to transform the plants, whereby the needle was used to puncture the hypocotyl and a droplet with the bacterial suspension was placed on the wound. Petri dishes containing the transformed roots were sealed and left in the dark for two days and then moved to 21° C. under 16 hour light/8 hour dark conditions. After three weeks, plants with transformed roots were moved to Magenta boxes (Sigma-Aldrich) filled with a 4:1 mixture of lightweight expanded clay aggregate (LECA, 2-4 mm; Saint-Gobain Weber A/S) and vermiculite (size M; Damolin A/S) supplemented with 80 ml nitrogen-free ¼×B&D nutrient solution. All plants were grown at 21° C. under 16 hour light/8 hour dark conditions.

### Nodulation Assays

[0127] Chimeric receptors under the control of the Nfr1 promoter were tested for their ability to complement a L. japonicus nfr1-1 loss-of-function mutant that is unable to develop root nodules (Radutoiu, S. et al. Nature 2003 425). Transformed L. japonicus plants were inoculated with 400 μl per plant of M. loti R7A DsRed strain at a final concentration of ° Da)=0.04. At five weeks post inoculation, nodules were counted and images were acquired with a Leica FluoStereo M165FC microscope equipped with the Leica DFC310 FX camera.

### Oxidative Burst Assays

[0128] Chimeric receptors under the control of the Cerk6 promoter were tested for their ability to complement the L. japonicus cerk6-1 loss-of-function mutant that is unable to produce chitin-induced reactive oxygen species (ROS; Bozsoki, Z. et al. Proc. Natl. Acad. Sci. 2017 114: E8118-E8127). Three-week-old transformed L. japonicus roots were cut into 1 mm pieces, collected into white 96-well flat-bottomed polystyrene plates (Greiner Bio-One), and kept overnight in sterile water. The water on the root pieces was then replaced with a reaction mixture consisting of 0.5 mM L-012 (Wako Chemicals), 5 μg ml⁻¹ horseradish peroxidase (Sigma), and either 1 μM octa-N-acetyl-chitooctaose (CO8, obtained from Isosep) or 0.5 μM flg22 (EZBiolab). Luminescence was recorded with a Varioskan LUX multimode microplate reader (ThermoFisherScientific) in a time course manner. The ratio between CO8-induced ROS peak and flg22 peptide-induced ROS peak in each sample was obtained. Flg22 treatment was used as internal control for root responsiveness to elicitors. This ratio was normalized to that obtained for wild-type included in the assay as a control. (FIG. 2C, FIG. 6A).

### GUS Staining

[0129] 5-week-old transformed L. japonicus roots were stained with 0.5 mg ml⁻¹ 5-bromo-4-chloro-3-indolyl-β-D-glucuronic acid (X-Gluc), 100 mM potassium phosphate buffer (pH 7.0), 10 mM EDTA (pH 8.0), 1 mM potassium ferricyanide, 1 mM potassium ferrocyanide, and 0.1% Triton X-100. The stained roots were incubated at 37° C. overnight. Roots were washed with EtOH 70% twice before image acquisition (FIG. 2B).

Agrobacterium Mediated Transient Transformation of N. benthamiana

[0130] A. tumefaciens carrying LysM receptor kinase expression constructs were grown overnight in liquid medium (28° C. at 180 rpm). The cells were pelleted and resuspended in water to a final density of OD₆₀₀=0.6-0.8, and incubated at room temperature for 2 hours. The bacterial suspension was then infiltrated into leaves of 4-week-old N. benthamiana plants with a needleless syringe (FIGS. 3A-3B).

### Confocal Microscopy and Image Processing

[0131] Confocal imaging was performed using Zeiss LSM780 with the following excitation/emission parameters for generating composite images: i) YFP-514/520-560 nm, ii) mCherry-561/570-600 nm. Fluorescence of YFP and mCherry was acquired separately. Channels were arranged using Fiji (Schindelin, J. et al. Nat Methods 2012 9:676-682).

### Quantification and Statistical Analysis

[0132] Data analyses were conducted with R using ggplot2 (The R core team, R Foundation for Statistical Computing, Vienna, Austria, 2019; Villanueva, R. A. M. and Chen, Z. J. Meas-Interdiscip Res 2019 17: 160-167). For statistical analysis, one-way analysis of variance (ANOVA) with Tukey's multiple comparisons test were used.

### Results

### The Ectodomains of NFR1 and CERK6 are Necessary for Nodulation and CO8-Induced Immune Responses

[0133] The contribution of LysM receptor kinase ectodomains (EC), transmembrane and juxtamembrane domains (TJ), and the kinase domains (KD) to nodulation after M. loti inoculation, or reactive oxygen species (ROS) formation in response to CO8 treatment was investigated. In L. japonicus, the LysM receptor kinase NFR1 is required for nodule formation upon inoculation with M. loti, and the LysM receptor kinase CERK6 is required for CO8-induced ROS formation. Introduction of NFR1 (construct 1 in FIGS. 2A-2B) and all chimeras with the ectodomain of NFR1 (constructs 2, 3, and 4 in FIGS. 2A-2B) restored nodule formation to L. japonicus nfr1-1 (nfr1 henceforth) loss-of-function mutant roots, but were not able to restore ROS production in a cerk6-1 (cerk6 henceforth) loss-of-function mutant after CO8 treatment (constructs 9, 10, 11, and 12 in FIG. 2C).

[0134] Chimeras complemented the absence of nodule formation phenotype of the nfr1 mutant roots to different extents. Expression of construct 3 containing the KD of CERK6 resulted in to a significantly lower level of nodulation compared to constructs 1 or 2, while exchanging both the TJ and KD with CERK6 in construct 4 had a dramatic consequence on the nodulation phenotype. Indeed, only 2 out of the 33 plants expressing construct 4 formed nodules (FIG. 2A), indicating that combining molecular elements present in the KD and TJ regions of CERK6 had a negative impact on nodulation signaling. All nodules formed on roots expressing constructs 1, 2, 3, and 4 were infected by M. loti bacteria (FIG. 2B), showing that both nodulation and infection processes were activated. Furthermore, induction of the symbiotic marker pNin-GUS was detected only in the nodulated roots (constructs 1, 2, 3, and 4, FIG. 2B), showing that in L. japonicus M. loti-induced signaling activated by the functional chimeras progressed all the way to nodulation. In contrast, none of the chimeras containing the ectodomain of CERK6 were able to trigger nodulation in the nfr1 mutant (constructs 5, 6, 7, and 8 in FIG. 2A).

[0135] Similarly, chimeras complemented the deficiency of ROS production in the cerk6 mutant to different extents. Both CERK6 (construct 13 in FIG. 2C) and one of the chimeras containing the CERK6 ectodomain (construct 14) complemented CO8-dependent ROS production in cerk6 (FIG. 2C). Interestingly, chimeric constructs 15 and 16, containing the NFR1 KD, were unable to complement cerk6. These results showed that NFR1 KD, even when coupled to the CERK6 ectodomain, could not activate the immune signaling pathway leading to ROS production after CO8 treatment.

[0136] Previous studies based on overexpression of chimeric receptors between L. japonicus and A. thaliana LysM proteins pinpointed the role of NFR1 ectodomains in Nod factor recognition (Nakagawa, T. et al. Plant J 2011 65:169-180; Wang, W. et al. Plant J 2014 78:56-69). The results presented herein based on native expression levels (rather than overexpression) of chimeric receptors from paralogous L. japonicus proteins showed that the ectodomains of NFR1 and CERK6 contained major determinants for ligand perception and signaling specificity, and demonstrated that this can be further modulated by their intracellular domains.

### Specificity for Nod Factor and Chitin Recognition is Determined by the LysM1 Domains

[0137] To determine which of the three LysM domains in the ectodomains of NFR1 and CERK6 harbored ligand specificity determinants, a series of chimeric receptors was tested. The chimeric receptors had combinations of the three LysM domains originating from NFR1 or CERK6 receptors, which were coupled either to NFR1 or CERK6 TJs and KDs (FIG. 4A). Surprisingly, nodulation and ROS production was dependent on the origin of the LysM1 domain. The three chimeric proteins (constructs 17, 18, and 19) containing the NFR1 LysM1 domain were able to restore M. loti-dependent nodulation (FIG. 4B) and infection in nfr1 L. japonicus (FIGS. 5A-5B). The corresponding three chimeras (constructs 20, 21, and 22) with the CERK6 LysM1 domain did not restore nodulation of nfr1 mutants (FIGS. 4B, 5A-5B).

[0138] Reciprocal results were obtained in assays of cerk6 complementation for CO8-dependent ROS production. L. japonicus cerk6 roots expressing constructs 28, 29, and 30, which contained the LysM1 domain of CERK6, produced ROS after CO8 treatment. In contrast, roots expressing constructs 25, 26, and 27, which contained the LysM1 domain from NFR1, failed to complement the cerk6 mutant phenotype (FIG. 6A).

[0139] Results from expression of constructs 18 and 19 revealed a lower complementation efficiency of nfr1 when compared to NFR1 (construct 1) or construct 17 receptors, indicating that CERK6 LysM2 was detrimental to nodulation (FIG. 4B). Besides this modest impact of the CERK6 LysM2 domain on nfr1 complementation, the origin of the LysM2 and LysM3 domains (i.e., CERK6 or NFR1) had no major impact on nodulation or ROS production. Without wishing to be bound by theory, this indicated that LysM2 and LysM3 did not play a critical role in determining the specificity for Nod factor and chitin perception in NFR1 and CERK6, respectively.

### Analysis of Point Mutations in Putative LysM1 and LysM2 Ligand-Binding Sites

[0140] Previous structural studies of the A. thaliana CERK1 (AtCERK1) ectodomain identified a chitin binding site in LysM2 (Liu, T. et al. Science 2012 336: 1160-1164). The results presented herein from L. japonicus identified LysM1 domains as critical for functional specificity. Therefore, whether the putative binding sites within LysM1 or LysM2 were necessary for LysM receptor kinase function was assessed. The structure of L. japonicus CERK6 and the chitin-bound structure of AtCERK1 were used to investigate potential ligand binding sites in LysM1 and LysM2 of CERK6, and to identify conserved amino acids that, when mutated to a bulky residue (i.e., tryptophan), could disrupt the possible binding pockets (FIG. 6B) (Liu, T. et al. Science 2012 336: 1160-1164). As shown in FIG. 6B, the CERK6 LysM1 and LysM2 domains both had predicted CO ligand-binding pockets. To disrupt these putative ligand binding pockets, amino acid substitutions were introduced in LysM1 and LysM2 of CERK6 and NFR1 at corresponding positions. In particular, the CERK6 LysM1 domain residue V79 was mutated to tryptophan (V79W, construct 31), and the LysM2 domain residue I141 was mutated to tryptophan (I141W, construct 32), as shown in FIG. 6B. Corresponding mutations were also introduced into NFR1 LysM1 and LysM2, with residue 178 mutated to tryptophan in LysM1 (I78W, construct 23), and residue 1140 mutated to tryptophan in LysM2 (I140W, construct 24). The positions of these point mutations are shown in the schematic diagram provided in FIG. 4A.

[0141] Functional analyses of the receptor mutants with these tryptophan substitutions in LysM1 (constructs 23 and 31) or LysM2 (constructs 24 and 32) revealed that only mutations in the LysM1 domain impaired the ability of NFR1 and CERK6 receptors to complement mutants for their defective phenotypes in root nodule symbiosis and immunity, respectively (FIGS. 3B, 4B, 5B, and 6A). These results provided a molecular basis and explanation of previous observations from analyses of mutations in Nod factor receptors from P. sativum (Sym37) and M. truncatula (Lyk3). In SYM37, an L77 to P substitution in the RisNod4 mutants results in impaired symbiosis (Zhukov, V. et al. Mol Plant Microbe Interact 2008 21: 1600-1608), and in M. truncatula the lyk3-3 allele contains a P87S mutation with similar defective symbiotic phenotype (Smit, P. et al. Plant Physiol 2007 145: 183-191). FIG. 13E indicates the location of the P87S mutation in M. truncatula lyk3-3 on a structural model of LysM1 from LYK3, and also indicates the position of the L77P mutation in P. sativum SYM37 mutants. Both of these mutations are located at the predicted ligand binding site in the LysM1 domain.

[0142] Together, these observations provided strong evidence for the role of the LysM1 domain in determining the specificity of Nod factor and chitin perception. Furthermore, results from analyses of point mutations in L. japonicus (FIGS. 4B, 6A) and A. thaliana receptors (Liu, T. et al. Science 2012 336: 1160-1164) illustrated the plasticity of glycan (e.g., chitin or Nod factor) recognition and functionality of LysM receptors in plants.

### Example 2: Identification of Regions in the LysM1 Domain that are Required for Nodulation, CO8-Induced Immune Response, and Nod Factor Recognition

[0143] The following example describes experiments assessing the contribution of regions within the LysM1 domain to nodulation, CO8-dependent ROS production, and specific Nod factor recognition.

### Materials and Methods

[0144] L. japonicus materials and growth conditions, bacterial strains and culture conditions, hairy root transformation, nodulation assays, and ROS formation assays were all as described in Example 1, above.

M. truncatula Lines, Growth Conditions, and Nodulation Assays

[0145] Medicago truncatula cv. Jemalong A17 was the wild-type M. truncatula variety. The lyk3-1 (hcl-1) EMS mutant line was used as the background for nodulation assays (see FIG. 9B).

[0146] M. truncatula germination and nodulation assays were performed as described for L. japonicus in Example 1, above, except that M. truncatula was inoculated with S. meliloti 1021 DsRed for nodulation assays.

S. meliloti Strain and Culture Conditions

[0147] Sinorhizobium meliloti strain 1021 expressing the fluorescent protein DsRed was used, and was grown in TY/YMB medium at 28° C.

### Generation of Plant Expression Vectors

[0148] For hairy root transformation of L. japonicus and M. truncatula, the pIV10 expression vector (Hansen, J. et al. Plant Cell Rep 1989 8: 12-15) was used. This expression vector contains a sequence encoding triple YFP fused to a nuclear localization signal (pIV10_tYFP-NLS) that serves as a transformation control.

[0149] Expression constructs were generated to express LysM receptor kinases in L. japonicus or M. truncatula. LysM receptor kinase coding sequences were placed under control of the L. japonicus Nfr1 (SEQ ID NO: 261) or L. japonicus Cerk6 promoters (SEQ ID NO: 264), or the M. truncatula Lyk3 promoter (SEQ ID NO: 262). Plasmids containing gene fragments encoding the respective domains or regions of L. japonicus NFR1, L. japonicus CERK6 and or M. truncatula LYK3 were assembled with the appropriate promoter and cloned into the pIV10_tYFP-NLS expression vector via Golden Gate cloning (FIG. 1D; Engler, C. et al. PLoS One 2008 3: e3647). Expression constructs were generated to express NFR1, CERK6, LYK3, chimeric alleles of NFR1 and CERK6, and chimeric alleles of NFR1 and LYK3 (see FIGS. 7A-7C, 8A-8B, and 9A-9B). As described in Example 1, chimeric alleles of LysM receptor kinases were designed based on their modular structure, which has, from N to C terminus, an extracellular region also known as the ectodomain (“EC”) made up of three LysM domains (LysM1, LysM2, and LysM3), a transmembrane segment and an intracellular region with a juxtamembrane segment (“TJ”), and a kinase domain (“KD”).

[0150] Amino acid boundaries for the purpose of exchanging domains between NFR1 and CERK6 were defined as described in Example 1, above. To exchange domains between NFR1 and LYK3, amino acid boundaries were defined as diagrammed in FIG. 8B. As shown in FIG. 8B, the NFR1 LysM2 domain began at residue D91, the TJ began at residue G227, and the KD began at residue L325. The LYK3 LysM2 domain began at residue E91, the TJ began at residue G226, and the KD began at residue L324.

[0151] Further, regions within the LysM1 domain were identified and exchanged between LysM receptor kinases. Junction points between the regions were chosen based on the LysM1 domain structure, to preserve the overall topology of the LysM1 domain. This structure-guided design of the junction point was used to create functional and well-folded receptor chimeras.

[0152] As shown in FIG. 7A and FIG. 8A, the NFR1 LysM1 region I contained amino acid residues NCLKGCDL (SEQ ID NO: 144), region II contained residues PGVFILQNITTF (SEQ ID NO: 145), region III contained residues EIVSSNDAIT (SEQ ID NO: 108), and region IV contained residues LNDINIQSF (SEQ ID NO: 147). As shown in FIG. 7A, the CERK6 LysM1 region I contained amino acid residues KCTHGCA (SEQ ID NO: 148), region II contained residues NGSNLTYISEI (SEQ ID NO: 149), region III contained residues SLLTKPEDIV (SEQ ID NO: 150), and region IV contained residues ASKDSVQAG (SEQ ID NO: 151). As shown in FIG. 8A, the LYK3 LysM1 region II contained amino acid residues PSIQLRNISNF (SEQ ID NO: 152), region III contained residues KIVLTNSFDVI (SEQ ID NO: 153), and region IV contained residues FDKSGLISY (SEQ ID NO: 154).

[0153] LysM receptor kinase expression constructs were assigned numerical labels that correspond to the schematic diagrams of the constructs presented in the FIGS. Table 3 provides a description of the LysM receptor kinase expression constructs used in this example.

TABLE 3
LysM receptor kinase expression constructs

| Con- | | | |
|---|---|---|---|
| struct | Pro- | Description of LysM Receptor | |
| Number | moter | Kinase | FIGS. |
| 1 | Nfr1 | NFR1 | FIGS. 7B, 9A |
| 13 | Cerk6 | CERK6 | FIG. 7C |
| 33 | Nfr1 | NFR1 with CERK LysM1 region I | FIG. 7B |
| 34 | Nfr1 | NFR1 with CERK LysM1 region II | FIG. 7B |
| 35 | Nfr1 | NFR1 with CERK LysM1 region III | FIG. 7B |
| 36 | Nfr1 | NFR1 with CERK LysM1 region IV | FIG. 7B |
| 37 | Cerk6 | CERK6 with NFR1 LysM1 region I | FIG. 7C |
| 38 | Cerk6 | CERK6 with NFR1 LysM1 region II | FIG. 7C |
| 39 | Cerk6 | CERK6 with NFR1 LysM1 region III | FIG. 7C |
| 40 | Cerk6 | CERK6 with NFR1 LysM1 region IV | FIG. 7C |
| 41 | Nfr1 | LYK3 | FIGS. 9A, 10A |
| 42 | Nfr1 | LYK3 with NFR1 EC | FIGS. 9A, 10A |
| 43 | Nfr1 | NFR1 with LYK3 EC | FIGS. 9A, 10A |
| 44 | Nfr1 | NFR1 with LYK3 LysM1 regions II | FIGS. 9A, 10A |
| | | and IV | |
| 45 | Nfr1 | NFR1 with LYK3 LysM1 regions II | FIGS. 9A, 10A |
| | | and IV, TJ, and KD | |
| 46 | Lyk3 | NFR1 | FIGS. 9B, 10B |
| 47 | Lyk3 | LYK3 | FIGS. 9B, 10B |
| 48 | Lyk3 | LYK3 with NFR1 EC | FIGS. 9B, 10B |
| 49 | Lyk3 | NFR1 with LYK3 EC | FIGS. 9B, 10B |
| 50 | Lyk3 | LYK3 with NFR1 LysM1 regions II | FIGS. 9B, 10B |
| | | and IV | |
| 51 | Lyk3 | LYK3 with NFR1 LysM1 regions II | FIGS. 9B, 10B |
| | | and IV, TJ, and KD | |

### Expression and Purification of LysM Receptor Ectodomains

[0154] The M. truncatula LYK3 ectodomain (residues 23-229) was codon-optimized for expression in insect cells (Genscript, Piscataway, USA). The native signal peptide was predicted using SignalP 4.1 (residues 1-23) and replaced with the signal peptide of the AcMNPV major glycoprotein 67 (MLLVNQSHQGFNKEHTSKMVSAIVLYVLLAAAAHSAFA (SEQ ID NO: 155)). The C-terminal boundary was predicted with TMHMM version 2.0 (residue 229) and a hexahistidine tag was added. The insert containing MtLYK3 (23-229), the N-terminal gp67 secretion signal, and the C-terminal hexahistidine tag was cloned into the transfer vector pOET4 (Oxford expression technologies) using the XhoI/HindIII restriction sites. Expression and purification of L. japonicus CERK6 and NFR1 was performed as previously described by Bozsoki, Z. et al. Proc. Natl. Acad. Sci. 2017 114: E8118-E8127 and Murakami, E. et al. Elife 2018 7. Chimeric ectodomains of CERK6 and NFR1 with exchanged regions II (CERK6 N43-I53 (SEQ ID NO: 149), NFR1 P41-F52 (SEQ ID NO: 145)) and IV (CERK6 Å74-G82 (SEQ ID NO: 156), NFR1 L73-F81 (SEQ ID NO: 147)) were based on the expression constructs for CERK6 (residue 27-223 (SEQ ID NO: 157)) and NFR1 (residue 25-222 (SEQ ID NO: 158)) ectodomains and purchased as codon-optimized pOET4 transfer vector constructs for insect cell expression (GenScript, Piscataway, USA). The native signal peptides (CERK6 residues 1-26 (SEQ ID NO: 159), NFR1 residue 1-24 (SEQ ID NO: 160)), were replaced with a shortened signal peptide from the AcMNPV major glycoprotein 67 (MVSAIVLYVLLAAAAHSAFA (SEQ ID NO: 161)). NFR1, CERK6 and chimeric ectodomains were all cloned with a C-terminal hexadistidine tag. All recombinant viruses were produced in Sf9 cells using the flashBAC GOLD kit (Oxford expression technologies) according to the manufacturer's instructions. Lipofectin (ThermoFisher Scientific) was used as a transfection reagent.

[0155] Protein expression and purification was performed as follows. Spodoptera frugiperda SD cells were grown in suspension at 26° C. in serum-free MAX-XP (BD Biosciences, discontinued) or HyClone SFX (GE Healthcare) insect cell medium supplemented with 1% (v/v) Pen/Strep (10000 U/ml, Life technologies) and 1% (v/v) chemically defined lipid concentrate (Gibco). Protein expression was induced by addition of passage 3 virus (MOI=1-3) to a cell density of 10⁶ cells/ml. After 4-7 days of expression, medium containing proteins of interest was harvested by centrifugation and dialyzed overnight against 50 mM Tris-HCl pH 8, 200 mM NaCl at 4° C. Ectodomains were captured from the medium and purified by two subsequent steps of Ni-IMAC purification (HisTrap excel and His Trap HP, GE Healthcare). As a final purification step, all ectodomains were subjected to SEC (see FIGS. 11A-11E) on a Superdex 75 10/300 GL, Superdex 200 10/300 GL, Superdex Increase 75 10/300 GL, Superdex Increase 200 10/300 GL, HiLoad Superdex 75 16/600 pg, or HiLoad Superdex 200 16/600 pg (all GE Healthcare) on an AKTA purifier or AKTA pure system (GE Healthcare) in phosphate buffered saline, pH 7.2 supplemented to a total of 500 mM NaCl (for binding assays) or 50 mM Tris-HCl pH 8, 200 mM NaCl (for crystallography).

### Biolayer Interferometry (BLI)

[0156] Direct binding of receptor ectodomains to Nod factor conjugates was measured using an Octed RED 96 biolayer interferometry system (ForteBio, Molecular Devices) (see FIGS. 12A-12D). Binding experiments were performed in phosphate buffered saline pH 7.2, 500 mM NaCl, 0.01% Tween-20 at 30° C. under 1000 rpm agitation using black polystyrene 96-well plates (Sarstedt). Biotinylated Nod factor conjugates were immobilized on streptavidin biosensors (kinetic quality, ForteBio, Molecular Devices) at a concentration of 100-250 nM for 5 minutes. After a 60 seconds wash step, association was measured for 10 minutes and dissociation for 5 minutes. In parallel, unspecific binding to biosensors was accounted for by measuring binding of receptor to biosensors, where biotin was immobilized on the active surface. Binding data were analyzed using ForteBio Data analysis 7.0 (ForteBio, Molecular Devices) and Graphpad Prism version 8.3.0 (Graphpad Software LLC). Fits were performed by non-linear regression (Association then dissociation model with interstep correction) on data where the biotin reference sensors were subtracted. The goodness of fit is described by the global R² on the mean value of each point.

[0157] Biotinylated S. meliloti Nod factor IV (Ac, C16:2, S) conjugate was obtained on a Dionex UltiMate 3000 HPLC system using a Reprosil-Pur C4 (300 Å, 5 μm, 150×4.6 mm) column. A gradient of CH3CN—H2O, 1:19®1:0, containing 0.1% HCOOH with a flow rate of 1 mL/minute for 10 minutes was applied.

### Results

### Specific Regions in LysM1 are Required for Nod Factor and Chitin Signaling

[0158] To dissect which elements within LysM1 were important for the specific functions of NFR1 and CERK6, four regions in LysM1 with substantial sequence differences were identified (regions I to IV, see FIG. 7A). The requirement of these specific regions for Nod factor and CO8 recognition was tested using chimeric receptors (FIG. 7B, FIG. 6A).

[0159] Regions I and III could be swapped between NFR1 and CERK6 receptors with no significant impact on the ability of the chimeric receptors to function in M. loti-induced nodulation (constructs 33 and 35 in FIG. 7B) or CO8-dependent ROS production (constructs 37 and 39 in FIG. 7C). In contrast, regions II and IV were both necessary for the ability of the respective receptors to function in planta (FIGS. 6A and 7B). Chimeric receptors in which region II (construct 34) or IV (construct 36) from CERK6 were inserted into NFR1 were not able to restore nodulation to the nfr1 mutant (FIG. 7B and FIGS. 5A-5B). Similarly, chimeric receptors in which region II (construct 38) or IV (construct 40) from NFR1 was inserted into CERK6 failed to induce ROS after CO8 treatment when expressed in cerk6 roots (FIG. 7C).

[0160] Expression in N. benthamiana (tobacco) leaves revealed that the CERK6 chimeric receptor in which regions II and IV were replaced by corresponding regions of NFR1 was produced and localized at the plasma membrane, like full-length NFR1 and CERK6 (see domain construct corresponding to construct 65 in FIG. 3B). This indicated that the structure-aided strategy for exchanging regions between paralogous receptors was appropriate and preserved protein stability. Therefore, the absence of nodulation or ROS production in the region II and IV swaps, as described above, was not merely due to the generation of an unstable protein product.

[0161] The results presented herein identify regions II and IV in NFR1 and CERK6 as necessary for Nod factor and chitin receptor functions.

Regions II and IV of LysM1 from NFR1 and LYK3 are Necessary for Perception of Specific Nod Factors

[0162] Legume-rhizobia symbiosis is characterized by Nod-factor dependent host-symbiont specificity, and mutant studies have demonstrated that NFR1 and LYK3 are critical for recognition of Nod factors in L. japonicus and M. truncatula, respectively (Radutoiu, S. et al. EMBO J 2007 26: 3923-3935; Radutoiu, S. et al. Nature 2003 425: 585-592; Smit, P. et al. Plant Physiol 2007 145: 183-191). The present disclosure based on NFR1 and CERK6 receptors has identified two regions in the LysM1 domain as necessary for signaling from CO8 (chitin) and Nod factors. Without wishing to be bound by theory, it was hypothesized that the corresponding regions in L. japonicus NFR1 and M. truncatula LYK3 (FIGS. 8A-8B) were required for specific recognition of Nod factors produced by the two symbionts, varying in their moieties at the reducing and non-reducing ends (FIG. 8C, Tables 4 and 5), and known to be important for host specificity (Lerouge, P. et al. Nature 1990 344: 781-784; Rodpothong, P. et al. Mol Plant Microbe Interact 2009 22: 1546-1554). Tables 4 and 5, below, provides a summary of the structures of Nod factors of various species and strains, with the specific moieties at the ten R groups as indicated in FIG. 8D. Tables 4 and 5 also lists the number of N-Acetylglucosamine monomers indicated by the bracketed monomer in FIG. 8D in column “n”.

TABLE 4
Summary of Nod factor structure features R1-R6

| | Rhizobial | | | | | | |
|---|---|---|---|---|---|---|---|
| | species and | | | | | | |
| Host | strain | R1 | R2 | R3 | R4 | R5 | R6 |
| Glycine soja | B. elkanii | C18:1, | Me, H | Cb, Ac | Cb, Ac | Cb, Ac, H | 2-O—Me |
| (Soybean) | USDA61 | C16:0 | | | | | |
| | B. | C18:1 | H | H | H | H | 2-O—Me |
| | japonicum | | | | | | |
| | USDA110 | | | | | | |
| | B. | C18:1, | H | H | H | Ac, H | 2-O—Me |
| | japonicum | C16:0, | | | | | |
| | USDA135 | C16:1 | | | | | |
| | S. fredii | C16:0, | H | H | H | H | 2-O—Me |
| | HH103 | C16:1 | | | | | |
| | | C18:0, | | | | | |
| | | C18:1 | | | | | |
| | S. fredii | C16:0, | H | H | H | H | 2-O—Me |
| | USDA191w | C16:1 | | | | | |
| | | C18:0, | | | | | |
| | | C18:1 | | | | | |
| | S. fredii | C18:1 | H | H | H | H | 2-O—Me |
| | USDA257 | | | | | | |
| Phaseolus | R. etli | C18:0, | Me | H | Cb | H | 4-O—AcFuc |
| vulgaris | CE3 | C18:1 | | | | | |
| | R. etli | C18:1 | Me | Cb, H | Cb, H | Cb, H | 4-O—AcFuc |
| | CFN42 | | | | | | |
| | Rhizobium | C16:0, | Me, H | H | H | H | S, H |
| | sp. GRH2 | C18:0, | | | | | |
| | | C18:1 | | | | | |
| | | C20:1 | | | | | |
| | R. tropici | C18:1 | Me | H | H | H | S, H |
| | CFN299 | | | | | | |
| | R. tropici | C16:0, | Me, H | H | H | H | S, H |
| | CIAT899 | C16:1, | | | | | |
| | | C18:0 | | | | | |
| | | C18:1, | | | | | |
| | | C20:0, | | | | | |
| | | C20:1 | | | | | |
| L. japonicus | M. loti | C18:1, | Me | H | Cb | H | 4-O—AcFuc |
| | E1Ri | C18:0 | | | | | |
| | M. loti | C18:1 | Me | Cb, H | Cb, H | Cb, H | Fuc, |
| | JRL501 | | | | | | 4-O—AcFuc |
| | M. loti | C18:1, | Me | Cb, H | Cb | Cb, H | 4-O—AcFuc |
| | NZP2037 | C18:0 | | | | | |
| | M. loti | C16:0, | Me, H | Cb, H | H | Ac, H | 4-O—AcFuc |
| | NZP2213 | C16:1, | | | | | Fuc, H |
| | | C18:0 | | | | | |
| | | C18:1, | | | | | |
| | | C20:0, | | | | | |
| | | C20:1 | | | | | |
| | | C18:1, | | | | | |
| | | C18:0 | | | | | |
| | NZP2309 | C18:1, | Me | Cb | H | Cb | Fuc, |
| | | C18:0 | | | | | 4-O—AcFuc |
| M. | S. meliloti | C16:1, | H | H | H | Ac, H | S |
| truncatula | RCR2011 | C16:2, | | | | | |
| | | C16:3 | | | | | |
| | | C18-C26(ω- | | | | | |
| | | 1)-OH | | | | | |

TABLE 5
Summary of Nod factor structure features R7-R10

| | Rhizobial | | | | | | |
|---|---|---|---|---|---|---|---|
| | species and | | | | | | |
| Host | strain | R7 | R8 | R9 | R10 | n | Reference(s) |
| Glycine soja | B. elkanii | Gro, H | Me | H | H | 1, 2 | Carlson et al. |
| (Soybean) | USDA61 | | | | | | (1993) |
| | | | | | | | Stokkermans et |
| | | | | | | | al. (1996) |
| | B. japonicum | H | Me | H | H | 2 | Sanjuan et al. |
| | USDA110 | | | | | | (1992) |
| | B. japonicum | H | Me | H | H | 2 | Carlson et al. |
| | USDA135 | | | | | | (1993) |
| | S. fredii | H | Me | H | H | 0, 1, 2 | Gil-Serrano et |
| | HH103 | | | | | | al. (1997) |
| | S. fredii | H | Me | H | H | 0, 1, 2 | Bec-Ferté et al. |
| | USDA191w | | | | | | (1996) |
| | S. fredii | H | Me | H | H | 0, 1, 2 | Bec-Ferté et al. |
| | USDA257 | | | | | | (1994) |
| Phaseolus | R. etli | H | Me | H | H | 2 | Cárdenas et al. |
| vulgaris | CE3 | | | | | | (1995) |
| | R. etli | H | Me | H | H | 2 | Poupot et al. |
| | CFN42 | | | | | | (1995) |
| | Rhizobium sp. | H | Me | H | H | 1, 2, 3 | López-Lara et |
| | GRH2 | | | | | | al. (1995b) |
| | R. tropici | H | Me | H | H | 2 | Poupot et al. |
| | CFN299 | | | | | | (1993) |
| | R. tropici | Man | Me | H | H | 1, 2 | Folch-Mallol et |
| | CIAT899 | H | | | | | al. (1996) |
| L. japonicus | M. loti | H | Me | H | H | 2 | López-Lara et |
| | E1Ri | | | | | | al. (1995a) |
| | M. loti | H | Me | H | H | 2 | Niwa et al. |
| | JRL501 | | | | | | (2001) |
| | M. loti | H | Me | H | H | 2 | López-Lara et |
| | NZP2037 | | | | | | al. (1995a) |
| | M. loti | H | Me | H | Fuc, | 1, 0 | Olsthoorn et al. |
| | NZP2213 | | | | H | 1, 2 | (1998) |
| | NZP2309 | H | Me | H | H | 2 | Bek et al., 2009 |
| M. | S. meliloti | H | Me | H | H | 0, 1, 2 | Lerouge et al. |
| truncatula | RCR2011 | | | | | | (1990) |
| | | | | | | | Demont et al. |
| | | | | | | | (1993) |

[0163] To test whether regions in L. japonicus NFR1 and M. truncatula LYK3 were required for recognizing specific Nod factors, the capacity of LYK3 to complement nfr1 and of NFR1 to complement Lyk3 (i.e., M. truncatula lyk3-1) when expressed under the control of the Nfr1 or Lyk3 promoters was investigated (FIGS. 9A-9B and FIGS. 10A-10D). In particular, construct 41 expressed LYK3 under control of the L. japonicus Nfr1 promoter in the L. japonicus nfr1 mutant background, and construct 46 expressed NFR1 under control of the M. truncatula Lyk3 promoter in the M. truncatula Lyk3 mutant background. The absence of nodulation in the plants expressing construct 41 in FIG. 9A and construct 46 in FIG. 9B supported the role of these two receptors in the recognition of specific symbionts.

[0164] Next, whether the ectodomains of the two receptors were required for specific Nod factor recognition was tested. Chimeric constructs were designed (FIG. 8B) to test the requirement of the extracellular and intracellular regions of NFR1 and LYK3 for nodule formation (see constructs 42 and 43 in FIG. 9A, and 48 and 49 in FIG. 9B). This complementation study revealed that in both L. japonicus and M. truncatula, the ectodomains of NFR1 and LYK3 receptors were required for nodule formation, and therefore for signaling after rhizobial inoculation (FIGS. 9A-9B and FIGS. 10A-10D).

[0165] The role of regions II and IV of the LysM1 domains of NFR1 and LYK3 (FIG. 8A) in determining signaling specificity was then investigated. Complementation studies in L. japonicus revealed that embedding II and IV of LYK3 into NFR1 or a chimera with the ectodomain of NFR1 (construct 42) abolished the native capacity of these receptors to recognize M. loti and induce nodulation in the nfr1 mutant (constructs 44 and 45 in FIG. 9A). The reciprocal experiments in M. truncatula in which regions II and IV of NFR1 were embedded into LYK3 or a chimera with the ectodomain of LYK3 revealed a similar nodulation deficient phenotype (constructs 50 and 51 in FIG. 9B and FIGS. 10A-10D). Together, these results from in planta experiments provided support for the hypothesis that molecular determinants for Nod factor signaling specificity are located in the LysM1 domain of NFR1 and LYK3.

### Nod Factor Binding by Purified LysM Receptor Kinase Ectodomains

[0166] In parallel with the in planta studies, the ectodomains of NFR1, LYK3 and CERK6 were expressed in insect cells and purified (FIGS. 11A-11E). As seen in FIGS. 11A-11E, the purified proteins yielded slightly broadened SEC peaks also visible in coomassie-stained SDS-PAGE gels, due to heterologous glycosylation.

[0167] The capacity of the ectodomains of NFR1, LYK3 and CERK6 to bind M. loti or S. meliloti Nod factors was tested using biolayer interferometry (BLI; FIGS. 12A-12D). This revealed that the NFR1 and LYK3 receptors differed in their binding specificity in vitro. LYK3 bound its cognate S. meliloti Nod factor with a Kd of 27.4±0.4 μM and showed an approximate 6-fold reduction in binding to the non-cognate Nod factor from M. loti (Kd=173.2±0.9 μM; FIG. 12A). By contrast and less expected, the NFR1 ectodomain bound both cognate M. loti Nod factor and non-cognate S. meliloti Nod factor with similar affinities of Kd=38.7±0.4 and Kd=22.1±0.2 respectively (FIG. 12B). CERK6 showed no binding to M. loti Nod factor (FIG. 12C).

[0168] Next, whether regions II and IV were required for Nod factor binding was tested. A chimeric NFR1 ectodomain in which regions II and IV were derived from CERK6 was recombinantly expressed in insect cells. A stable protein was produced, purified (FIG. 11C), and tested for its ability to bind M. loti Nod factor. This chimera was not able to bind M. loti Nod factor (FIG. 12D), demonstrating that the regions II and IV in LysM1 of NFR1 are required for Nod factor recognition.

[0169] Together, the results herein from in planta and in vitro binding assays demonstrated the requirement of LysM1 regions II and IV for perception of specific Nod factors produced by symbiotic rhizobia.

### Example 3: Crystal Structure of the LYK3 Ectodomain

[0170] The following example describes the determination of the structure of the M. truncatula LYK3 ectodomain by X-ray crystallography. The LYK3 ectodomain structure revealed structural differences in the LysM1 ligand-binding sites of NFR1/LYK3-type Nod factor receptors and CERK6-type chitin receptors.

### Materials and Methods

### Expression and Purification of LysM Receptor Ectodomains

[0171] The M. truncatula LYK3 ectodomain was expressed and purified as described in Example 2, above.

### Crystallization and Structure Determination

[0172] The M. truncatula LYK3 ectodomain was crystallized in a sitting drop vapor diffusion setup at 5 mg/ml in 0.2 M ammonium sulphate, 0.1 M Bis-Tris pH 6.5, 31% PEG-3350, 450 μM Sinorhizobium meliloti Nod factor LCO-IV (Ac, C16:2, S), and 2.25% (v/v) acetonitrile (from the lipochitooligosaccharide solvent) at 4° C. Crystals were cryoprotected by supplementation of 10% (w/v) PEG-400 to the crystallization condition. A complete dataset to 1.49 Å resolution was collected at the 1911-3 beamline (MaxLab II, Lund, SE). Data was processed and reduced using XDS (Kabsch, W. Crystallogr D Biol Crystallogr 2010 66: 133-144). The phase problem was solved by molecular replacement with a polyalanine model of the AtCERK1 ectodomain crystal structure (PDB: 4EBZ) as a search model using Phaser (McCoy, A. J. et al. J. Appl Crystallogr 2007 40: 658-674). The model was built in Coot (Emsley, P. et al. Acta Crystallogr D Biol Crystallogr 2010 66: 486-501), and refinement was performed with phenix.refine from the PHENIX program suite (Adams, P. D. et al. Acta Crystallogr D Biol Crystallogr 2010 66: 213-221). No density for the lipochitooligosaccharide present in the crystallization condition was found in the electron density. Data collection and refinement statistics are reported in Table 6, below. The atomic coordinates and structure factors have been deposited in the Protein Data Bank, www.wwpdb.org, PDB ID: 6XWE. Figures of the crystal structure were prepared using PyMol 2.3.2 (Schrodinger LLC) (see FIGS. 13A-13E).

### Results

[0173] The detailed analyses of ectodomain domains and regions described in Examples 1 and 2, above, were aided by the available crystal structure of the chitin receptor CERK6 (Bozsoki, Z. et al. Proc. Natl. Acad. Sci. 2017 114: E8118-E8127). For the NFR1/LYK3-type Nod factor receptors, no structural information was available, limiting the understanding of how these proteins distinguish different Nod factors and chitin ligands at the molecular level. To gain insight into this class of receptors the ectodomain of M. truncatula LYK3 was crystallized, and the structure was determined at an atomic resolution of 1.5 Å (Table 6, FIGS. 13A-13E). Table 6 provides statistics for X-ray data collection and model refinement for the LYK3 ectodomain structure. In Table 6, values in parentheses correspond to the highest resolution shell.

TABLE 6
X-ray crystallography data collection and refinement statistics
Data Collection

| Dataset | LYK3 | |
|---|---|---|
| Beamline | MaxLab I911-3 | |
| Wavelength (Å) | 1.00 | |
| Temperature (K) | 100 | |
| Resolution range (Å) | 19.97-1.49 (1.543-1.49) | |
| Space group | P 2₁ 2 2₁ | |
| Unit cell dimensions (Å) | a = 44.21 b = 53.53 c = 95.00 | |
| | α = β = γ = 90 | |
| Total reflections | 271545 | (26783) |
| Unique reflections | 37598 | (3712) |
| Multiplicity | 7.2 | (7.2) |
| Completeness (%) | 99.81 | (99.81) |
| Mean I/σ (I) | 18.46 | (2.32) |
| Wilson B-factor (Å²) | 12.77 | |
| R_{merge} (%) | 0.08527 | (0.9369) |
| Rₘₑₐₛ (%) | 0.09193 | (1.011) |
| Rₚᵢₘ (%) | 0.03404 | (0.375) |
| CC1/2 | 0.999 | (0.77) |
| CC* | 1 | (0.933) |

Refinement

| | | |
|---|---|---|
| Reflections used in refinement | 37572 | (3712) |
| Reflections used for R-free | 2000 | (198) |
| R_{work} | 0.1394 | (0.1998) |
| R_{free} | 0.1798 | (0.2408) |
| CC(work) | 0.974 | (0.902) |
| CC(free) | 0.960 | (0.863) |

| | |
|---|---|
| Number of non-hydrogen atoms | 2191 |
| Number of macromolecules | 1678 |
| Number of ligands | 91 |
| Number of solvent | 422 |
| Protein residues | 211 |
| RMSD (bonds) (Å) | 0.008 |
| RMSD (angles) (°) | 1.50 |
| Ramachandran Plot favored (%) | 97.52 |
| Ramachandran Plot allowed (%) | 2.48 |
| Ramachandran Plot outliers (%) | 0.00 |
| Rotamer outliers (%) | 0.00 |
| Clashscore | 2.83 |
| Average B-factor (Å²) | 21.65 |
| Average macromolecules (Å²) | 16.66 |
| Average ligands (Å²) | 72.96 |
| Average solvent (Å²) | 30.43 |

[0174] The structure revealed a classical fold of three LysM domains in a clover-leaf arrangement stabilized by three disulfide bridges (FIG. 13A). Comparison of LYK3 and CERK6 ectodomain structures showed that the overall fold was conserved and the two structures aligned surprisingly well with a root mean square difference (RMSD) of 0.5 Å² (181 backbone atoms aligned) (FIG. 13B).

[0175] Interestingly, the main structural differences observed were in the LysM1 domain. In particular, region IV identified herein revealed a completely different conformation in LYK3 as compared to CERK6 (FIG. 13C). Mapping both regions II and IV onto the LYK3 structure showed that these constituted the major part of a putative ligand binding site containing the functionally important residues L77 from SYM37 (Zhukov et al. Mol Plant Microbe Interact 2008 21: 1600-1608), and the NFR1-178 mutant analyzed in construct 23 (FIG. 4B, FIG. 13E). A superposition of chitotetraose (chitin, C04) from the Arabidopsis thaliana CERK1 crystal structure onto LysM1 from CERK6 revealed no steric clashes between CERK6 and the superpositioned chitooligosaccharide ligand (FIG. 13D).

[0176] Together, these observations further supported the conclusion that regions II and IV of the LysM1 domain defined a ligand-binding site within NFR1-type receptor ectodomains.

### Example 4: Comparisons of LysM1 Domains of Nod Factor and Chitin-Binding LysM Receptor Kinases

[0177] The following example describes comparisons of the amino acid sequences, predicted structures, and conservation of the LysM1 domains of LysM receptor kinases. In particular, contrasting motifs in the LysM1 domain of NFR1/LYK3-type Nod factor receptors and CERK6-type chitin receptors are described.

### Materials and Methods

[0178] Motifs of LysM1 regions II and IV sequences were generated based on the amino acid sequences shown in FIGS. 14A-14C and FIGS. 15A-15C. In particular, the NFR-type receptor motifs were generated using the ectodomain sequences of Phaseolus vulgaris (XP_007141617.1), Arachis hypogaea (XP_029150476.1 and XP_029144024.1), Cajanus cajan (XP_020213700.2), Cicer arietinum (XP_004491136.1), Abrus precatorius (XP_027332267.1), M. truncatula (Q6UD73.1|LYK3), Glycine max (XP_006575588.1, XP_006595821.2), Lupinus angustifolius (XP_019434083.1, XP_019461629.1), L. japonicus (CAE02590.1/NFR1), Pisum sativum (ARX80051.1|Sym37), Vigna angularis (KOM467 48.1), Vigna radiata var. radiata (XP_014504127.1), Vigna unguiculata (XP_027939826.1), Arachis duranensis (XP_020982945.1), Arachis ipaensis (XP_020962820.1), Chamaecrista fasciculata (2879S20281), Mimosa pudica (Scaffold15743), Lupinus albus (Chr04g0249871), Spatholobus suberectus (TKY57029.1), and Prosopis alba (XP_028753017.1) NFR1-type receptors (FIGS. 14A-14C).

[0179] CERK-type receptor motifs were generated using the ectodomain sequences of Phaseolus vulgaris (XP_007146026.1), Arachis ipaensis (XP_016196976.1), Arachis duranensis (XP_015958400.1), Cajanus cajan (XP_020220445.1), Cicer arietinum (XP_004502028.1), Abrus precatorius (XP_027343427.1), M. truncatula (XP_003601376.2|LYK9), Glycine max (XP_003555584.1 and XP_003518454.1), Lupinus angustifolius (XP_019425563.1 and (XP_019455825.1), L. japonicus (BAI79273.1|CERK6), Vigna angularis (XP_017436810.1), Vigna radiata (XP_014509761.1), Vigna unguiculata (XP_027932400.1), Arachis hypogaea (XP_025693415.1), Mimosa pudica (Scaffold8584), Chamaecrista fasciculata (QANZ01053660), Lupinus albus (Chr04g0263521), Pisum sativum (LYK9), Arachis hypogaea (XP_025645378.1), Spatholobus suberectus (TKY72192.1), and Prosopis alba (XP_028758101.1) CERK6-type receptors (FIGS. 15A-15C).

[0180] Skylign was used to generate the motifs and the logos of the motifs as shown in FIGS. 14E and 15E (Wheeler T. J., et al. BMC Bioinformatics 2014 15:7).

### Results

[0181] The identification of specific regions in the LysM1 domain of NFR1, LYK3, and CERK6 which were necessary and structurally positioned for the recognition of ligands prompted the investigation of whether these regions represent general features in Nod factor and chitin receptors from legume species. It was hypothesized that amino acid residues responsible for Nod factor recognition would be diverse between species, to recognize variable and species-specific versions of Nod factors. By contrast, the chitin receptors were hypothesized to be conserved in the corresponding regions, given the invariable structure of this ligand.

[0182] Alignments and modelling of the entire ectodomain revealed a high level of surface conservation across the core LysM2 and LysM3 domains of both NFR1-type and CERK6-type receptors (FIGS. 14A-14E, 15A-15E). Most of the differences between species were found to be present in the LysM1 domain of NFR1-type receptors (FIGS. 14A-14C). Further dissection of this domain revealed that residues within regions II and IV were the most variable portions of LysM1 domains of NFR1-type receptors (FIGS. 14A-14E). By contrast, the corresponding regions in CERK6-type receptors were found to be highly conserved (FIGS. 15A-15E).

[0183] Superposition of a chitin oligomer onto the structure of the CERK6 LysM1 domain and prediction of the ligand interaction properties based on binding of A. thaliana CERK1 to chitin (Liu, T. et al. Science 2012 336: 1160-1164), identified six residues in each of region II (GSNLTY (SEQ ID NO: 14)) and region IV (KDSVQA (SEQ ID NO: 40)) that were structurally positioned to enable contact with the chitin molecule (FIG. 15E). These residues were highly conserved among legume CERK6-type receptors and, without wishing to be bound by theory, could represent a CO-binding motif (FIG. 15E).

[0184] Additional comparisons of LysM1 domain structures are provided in FIGS. 17A-17G.

[0185] Together, these observations strongly supported the notion that motifs in regions II and IV of LysM1 define a ligand-binding site within the NFR1/CERK6-type receptor ectodomains.

### Example 5: Reprogramming the Nod Factor Specificity of LysM Receptor Kinases

[0186] The following example describes engineering LysM receptor kinases for the recognition of specific Nod factors.

### Materials and Methods

[0187] Plant materials and growth conditions, bacterial strains and culture conditions, generation of plant expression vectors, hairy root transformation, nodulation assays, ROS formation assays, and BLI assays were all performed as described in Examples 1 and 2, above.

### Generation of Plant Expression Vectors

[0188] Expression constructs were generated to express LysM receptor kinases in L. japonicus or M. truncatula, as described in Examples 1 and 2, above. As above, chimeric alleles of LysM receptor kinases were designed based on their modular structure, which has, from N to C terminus, an extracellular region also known as the ectodomain (“EC”) made up of three LysM domains (LysM1, LysM2, and LysM3), a transmembrane segment and an intracellular region with a juxtamembrane segment (“TJ”), and a kinase domain (“KD”). Further, the boundaries between domains and regions of the LysM receptor kinases were defined as described in Examples 1 and 2, above. LysM receptor kinase expression constructs were assigned numerical labels that correspond to the schematic diagrams of the constructs presented in the FIGS. Table 7 provides a description of the LysM receptor kinase expression constructs used in this example. Schematic diagrams of the LysM receptor kinase constructs are shown in FIGS. 16A-16B.

TABLE 7
LysM receptor kinase expression constructs

| Con- | | | |
|---|---|---|---|
| struct | Pro- | Description of LysM Receptor | |
| Number | moter | Kinase | FIGS. |
| 1 | Nfr1 | NFR1 | FIG. 16A |
| 47 | Lyk3 | LYK3 | FIG. 16B |
| 52 | Nfr1 | LYK3 with NFR1 LysM1 regions II | FIGS. 10C, 16A |
| | | and IV | |
| 53 | Nfr1 | LYK3 with NFR1 LysM1 regions II | FIGS. 10C, 16A |
| | | and IV, TJ, and KD | |
| 54 | Lyk3 | NFR1 with LYK3 LysM1 regions II | FIGS. 10D, 16B |
| | | and IV | |
| 55 | Lyk3 | NFR1 with LYK3 LysM1 regions II | FIGS. 10D, 16B |
| | | and IV, TJ, and KD | |
| 56 | Lyk3 | NFR1 with LYK3 EC | FIGS. 10D, 16B |
| 57 | Lyk3 | NFR1 with LYK3 LysM1 regions II, | FIGS. 10D, 16B |
| | | III, and IV | |
| 58 | Lyk3 | NFR1 with LYK3 LysM1 regions II | FIGS. 10D, 16B |
| | | through IV, inclusive | |
| 59 | Nfr1 | NFR1 with CERK6 EC with NFR1 | FIGS. 10C, 16A |
| | | LysM1 region I | |
| 60 | Nfr1 | NFR1 with CERK6 EC with NFR1 | FIGS. 10C, 16A |
| | | LysM1 region II | |
| 61 | Nfr1 | NFR1 with CERK6 EC with NFR1 | FIGS. 10C, 16A |
| | | LysM1 region III | |
| 62 | Nfr1 | NFR1 with CERK6 EC with NFR1 | FIGS. 10C, 16A |
| | | LysM1 region IV | |
| 63 | Nfr1 | NFR1 with CERK6 EC with NFR1 | FIGS. 10C, 16A |
| | | LysM1 regions II and IV | |
| 64 | Nfr1 | CERK6 with NFR1 LysM1 regions II | FIGS. 10C, 16A |
| | | and IV, TJ, and KD | |
| 65 | Nfr1 | CERK6 with NFR1 LysM1 regions II | FIGS. 10C, 16A |
| | | and IV | |

### Results

### Swapping Specific Regions in the LysM1 Domain was Sufficient to Engineer Specific Nod Factor Recognition

[0189] Two regions in LysM1 domains distinguishing chitin and Nod factor receptors were identified (FIG. 14E, FIG. 15E), and for NFR1 and LYK3 receptors these regions were necessary for the specific recognition of M. loti and S. meliloti Nod factors (FIGS. 9A-9B). This raised the question of whether Nod factor specificity in L. japonicus and M. truncatula LysM receptor kinases could be reprogrammed by using these molecular fingerprints. To answer this, signaling incompetent receptors (see constructs 41 and 43, FIG. 9A) containing the ectodomains of LYK3 were modified by exchanging regions II and IV with the corresponding regions of NFR1. It was then tested whether M. loti nodulation occurred in the nfr1 mutant expressing these new receptors (see constructs 52 and 53, FIG. 16A). Reciprocal experiments were performed in M. truncatula lyk3 in which signaling incompetent receptors containing the ectodomains of NFR1 were modified by exchanging regions II and IV with the corresponding regions of LYK3 (see constructs 54 and 55, FIG. 16B). These new chimeras enabled complementation of nfr1 (constructs 52 and 53 in FIG. 16A and FIG. 10C), but not of lyk3 (constructs 54 and 55 in FIG. 16B and FIG. 10D). This indicated that symbiosis with M. loti in L. japonicus can be gained by exchanging regions II and IV of the LysM1 domain of LYK3. In contrast, a similar engineering strategy for NFR1 was not sufficient to restore symbiosis with S. meliloti in M. truncatula.

[0190] To locate additional elements that contributed to S. meliloti Nod factor recognition, the previously analyzed 23 sequences from NFR- or CERK-type receptors from legume species were inspected (FIGS. 14A-14C and FIGS. 15A-15C). In addition to the motifs in region II and IV, region III in NFR-type receptors (residues 54-65 in LYK3) contained considerable variation among legume species (FIGS. 14A-14D). This region was spatially close to the proposed ligand binding site (FIG. 14E). Therefore, it was hypothesized that amino acids present in region III could be important for recognition of S. meliloti Nod factor. This was examined by testing additional NFR1-LYK3 chimeras (constructs 56, 57, 58, see FIG. 16B). NFR1 receptors containing region III in addition to regions II and IV from LYK3 were functional in complementing the M. truncatula lyk3 mutant for symbiosis with S. meliloti (FIG. 16B and FIG. 10D). These phenotypes from chimeric receptors showed that regions around the Nod factor-binding site were important for engineering specificity into these receptors, and further that region III was important for ensuring host-symbiont compatibility in the nodulation of M. truncatula by S. meliloti.

### Reprogramming CERK6 Receptor to Recognize Nod Factors and Mediate Nodulation Signaling

[0191] Initiation of nodulation by Nod factor-producing rhizobia is restricted to leguminous plants and Parasponia species (Trinick, M. J. Nature 1975 244: 459-460), while chitin recognition is ubiquitous among plants. Based on the above results from engineering LYK3 and NFR1 receptors for specific Nod factor signaling (FIGS. 16A-16B), it was examined whether the chitin receptor CERK6 could be engineered to recognize M. loti Nod factor. In particular, whether systematic replacement of regions I, II, III and IV was sufficient to induce a change in ligand specificity in the signaling-incompetent chimeric receptor (construct 21) (FIG. 4A) in which CERK6 LysM1 replaced the corresponding domain of NFR1 was tested. Swapping individual regions with corresponding ones from NFR1 was insufficient to introduce perception of M. loti Nod factor, and no nodulation of 0′1 was observed (constructs 59, 60, 61, and 62 in FIG. 16A and FIG. 10C). This indicated that a more complex chimera was required for reprogramming CERK6.

[0192] As described above, structural and phylogenetic analyses indicated that regions II and IV featured a ligand binding site (FIG. 14E and FIG. 15E). The cooperative involvement of the two regions was tested by engineering a chimeric receptor in which both regions were concomitantly exchanged from CERK6 into NFR1 in the signaling incompetent receptor (construct 21). This new receptor (construct 63) was functional and enabled recognition of M. loti when expressed in nfr1 (FIG. 16A and FIG. 10C). The overall level of nodulation induced by construct 63 was lower than nodulation induced by NFR1, but the frequency of complementation was high (60 out of 63 transformed plants formed nodules), indicating that the engineered CERK6 protein (construct 63) functioned as Nod factor receptor and complemented nfr1 with a high level of penetrance.

[0193] Next, it was assessed whether regions II and IV of NFR1 were sufficient for M. loti Nod factor recognition when embedded in the CERK6 ectodomain (construct 8 in FIG. 2A) or the CERK6 full-length receptor (construct 5 in FIG. 2A). Construct 64, containing NFR1 regions II and IV as well as the NFR1 TJ and KD, was able to complement nfr1, but construct 65, containing NFR1 regions II and IV, was not (FIG. 16A, FIG. 10C). Expression of construct 64 resulted in fewer nodules formed on the transformed roots of nfr1, and a low penetrance (35 out of 95 transformed plants, FIG. 10C), when compared to construct 63 or full-length NFR1 (FIG. 16A). This reduction in the penetrance of restoring the nodulation phenotype may have occurred as a result of the observed negative impact of CERK6 LysM2 (constructs 18 and 19 in FIG. 4B), and CERK6 TJ and KD (construct 4 in FIG. 2A) on nfr1 complementation for nodulation.

[0194] To resolve whether these findings from in planta studies were a result of changes in the Nod factor binding properties of CERK6 (FIG. 12C), the chimeric ectodomain of construct 64 (containing CERK6 ectodomain with regions II and IV from NFR1) was expressed in insect cells, purified, and tested for in vitro binding of M. loti Nod factor. The purified chimeric ectodomain gained the capacity to bind M. loti Nod Factor (FIG. 16C) with a Kd=46.5 μM. This binding affinity was similar to that of the NFR1 ectodomain (FIG. 12B), demonstrating that regions II and IV played a major role in Nod factor recognition.

[0195] The examples herein describe the molecular mechanism behind the recognition of immunogenic and symbiotic chitin-based glycans (e.g., chitin or Nod factor) by LysM receptor kinases. Comparative structural and functional studies revealed a critical role of two distinct regions (regions II and IV) in LysM1 domains. These regions created a structurally defined binding pocket that discriminated between chitin (CO8) and Nod factor ligands. Two motifs with a high degree of conservation were identified in regions II and IV of legume chitin receptors (FIG. 16B), which likely reflected their ability to recognize and bind the structurally invariable chitin (FIG. 16B and FIGS. 15A-15D). In contrast, Nod factor receptors showed a high degree of sequence degeneration in corresponding motifs (FIG. 16A), reflecting the diversity in legume-rhizobia compatibility (FIG. 16A and FIGS. 14A-14D). The LYK3 and NFR1 receptors were found to vary in their signaling flexibility. Regions II and IV from NFR1 were sufficient to enable recognition of M. loti by LYK3 in L. japonicus (FIG. 14E), while regions II, III and IV from LYK3 were required for S. meliloti recognition by NFR1 in M. truncatula (FIG. 15E). Region III of LysM1 was also found to be highly variable between legume species (FIG. 16A and FIGS. 14A-14D), and, without wishing to be bound by theory, it is envisioned this could be required for establishing species-specific interactions with the ligand-bound or unbound co-receptor of the NFR5/NFP class.

[0196] In summary, the examples herein demonstrated that LysM receptor kinases have a programmable capacity for ligand perception, thus enabling rational engineering of specific signaling. The findings therefore provide a basis for engineering highly sensitive receptor complexes, which will allow symbiotic signaling with Nod factor-producing rhizobia for plant hosts outside of the nodulation Glade.

### Example 6: Generation and Testing of LysM Receptor Kinases with Exchanged Nod Factor and Chitin-Binding Motifs

[0197] The following example describes the generation of chimeric LysM receptor kinases. In particular, LysM receptor kinases with swaps of amino acid motifs associated with LysM1 domain ligand-binding sites of NFR1/LYK3-type Nod factor receptors, and LysM1 domain ligand-binding sites of CERK6-type chitin receptors are described. Further, the motif-swapped chimeras are assessed using in vivo and in vitro functional assays.

### Materials and Methods

[0198] Plant materials and growth conditions, bacterial strains and culture conditions, hairy root transformation, nodulation assays, and ROS formation assays are all performed as described in Examples 1 and 2, above.

### Generation of Plant Expression Vectors

[0199] Expression constructs are generated to express LysM receptor kinases in Hordeum vulgare (barley), Marchantia polymorpha, or L. japonicus. Expression constructs are summarized in Table 7, below.

[0200] Four constructs are generated to test for LCO perception (constructs 7.1-7.4). In constructs 7.1 and 7.2, LysM1 regions II and IV or the entire LysM1 domain of L. japonicus NFR1 are introduced into H. vulgare RLK4 (HvRLK4), and expression is driven by the Brachipodium distachion ubiquitin promoter (BdUbi10). Constructs 7.1 and 7.2 are transformed into H. vulgare.

[0201] In constructs 7.3 and 7.4, LysM1 regions II and IV or the entire LysM1 domain of L. japonicus NFR1 are introduced into the Marchantia polymorpha 51.1 receptor (Marpol 51.1) and expression is driven by the 35S promoter. Constructs 7.3 and 7.4 are transformed into M. polymorpha.

[0202] In addition, an expression construct is generated to test the role of the LysM1 domain in CO perception (construct 7.5). In construct 7.5, the LysM1 domain of L. japonicus CERK6 is introduced into M. truncatula LYK9 (MtLYK9), and expression is driven by the Cerk6 promoter. Construct 7.5 is transformed into L. japonicus.

TABLE 7
LysM receptor kinase expression constructs

| | | | SEQ ID NO of |
|---|---|---|---|
| Con- | | | full-length |
| struct | Pro- | Description of LysM Receptor | LysM Receptor |
| Number | moter | Kinase | Kinase |
| 7.1 | BdUbi10 | HvRLK4 with NFR1 LysM1 | SEQ ID NO: 265 |
| | | regions II and IV | |
| 7.2 | BdUbi10 | HvRLK4 with NFR1 LysM1 | SEQ ID NO: 266 |
| 7.3 | 35S | Marpol_51.1 with NFR1 | SEQ ID NO: 268 |
| | | LysM1 regions II and IV | |
| 7.4 | 35S | Marpol_51.1 with NFR1 | SEQ ID NO: 269 |
| | | LysM1 | |
| 7.5 | Cerk6 | MtLYK9 with CERK6 LysM1 | SEQ ID NO: 270 |

### Results

[0203] The ability of H. vulgare plants expressing constructs 7.1 or 7.2 to recognize M. loti Nod factor will be tested. Constructs 7.1 and/or 7.2 will enable H. vulgare plants to recognize M. loti Nod factor with higher specificity.

[0204] The ability of M polymorpha plants expressing constructs 7.3 or 7.4 to respond to M. loti Nod factor will be tested. Constructs 7.3 and/or 7.4 will enable M polymorpha to respond to M. loti Nod factor.

[0205] The ability of cerk6 mutant L. japonicus plants expressing construct 7.5 to generate ROS will be tested. Construct 7.5 will induce a ROS response in cerk6 mutant plants.

### Example 7: Identification of Important Residues in the LysM2 Domain for Nod Factor Perception

[0206] The following example describes the structural characterization of the ectodomain of the M. truncatula LysM receptor NFP, and the use of a structurally-guided approach to identify important residues for Nod factor perception in the LysM2 domain. After identifying important residues, point mutations in M. truncatula NFP were created and tested using ligand-binding assays. To confirm the biochemical observations, a complementation test was performed in M. truncatula nfp mutants using hairy root transformation.

### Materials and Methods

[0207] Expression and Purification of the Ectodomain of the M. truncatula LysM Receptor NFP

[0208] The M. truncatula NFP ectodomain (residues 28-246) was codon-optimized for insect cell expression (Genscript, Piscataway, USA) and cloned into the pOET4 baculovirus transfer vector (Oxford Expression Technologies). The native NFP signal peptide (residues 1-27, predicted by SignalP 4.1) was replaced with the AcMNPV gp67 signal peptide to facilitate secretion and a hexa-histidine tag was added to the C-terminus. Recombinant baculoviruses were produced in SD cells (Spodoptera frugiperda) using the FlashBac Gold kit (Oxford Expression technologies) according to the manufacturer's instructions with Lipofectin (ThermoFisher Scientific) as a transfection reagent. Protein expression was performed as follows. Suspension-cultured Sf9 cells were maintained with shaking at 299 K in serum-free MAX-XP (BD-Biosciences, discontinued) or HyClone SFX (GE Healthcare) medium supplemented with 1% Pen-Strep (10000 U/ml, Life technologies) and 1% CD lipid concentrate (Gibco). Protein expression was induced by adding recombinant passage 3 virus once the Sf9 cells reached a cell density of 1.0*10\hat{ }6 cells/ml. After 5-7 days of expression, medium supernatant containing NFP ectodomains was harvested by centrifugation. This was followed by an overnight dialysis step against 50 mM Tris-HCl pH 8, 200 mM NaCl at 277 K. The NFP ectodomain was enriched by two subsequent steps of Ni-IMAC purification (HisTrap excel/HisTrap HP, both GE Healthcare). For crystallography, N-glycans were removed using the endoglycosidase PNGase F (1:15 (w/w), room temperature, overnight). As a final purification step, NFP ectodomains was purified by SEC on a Superdex 200 10/300 or HiLoad Superdex 200 16/600 (both GE Healthcare) in phosphate buffered saline at pH 7.2 supplemented to a total of 500 mM NaCl (for binding assays) or 50 mM Tris-HCl, 200 mM NaCl (for crystallography). NFP ectodomain eluted as a single, homogeneous peak corresponding to a monomer.

[0209] Crystals of deglycosylated NFP ectodomain were obtained using a vapor diffusion setup at 3-5 mg/ml in 0.2 M Na-acetate, 0.1 M Na-cacodylate pH 6.5, and 30% (w/v) PEG-8000. Crystals were cryoprotected in their crystallization condition by supplementing with 5% (w/v) PEG-400 before being snap-frozen in liquid nitrogen. Complete diffraction data to 2.85 Å resolution was obtained at the MaxLab 1911-3 beamline. The phase problem was solved by molecular replacement using Phaser from the PHENIX suite with a homology model based on the A. thaliana CERK1 ectodomain structure (PDB coordinates 4EBZ) as a search model. Model building and refinement was done using COOT and the PHENIX suite, respectively. The output pdb filled structural model was generated and its electrostatic surface potential was calculated using the PDB2PQR and APBS webservers (PMID: 21425296). The results were visualized in PyMol using APBS tools 2.1 (DeLano, W. L. (2002). PyMOL. DeLano Scientific, San Carlos, Calif., 700.).

### Structurally-Guided Residue Identification

[0210] The M. truncatula NFP ectodomain (LysM Nod factor receptor) was structurally aligned to the ligand-bound ectodomain of A. thaliana CERK1 (LysM chitin receptor). Then, the electrostatic surface potential was mapped to the previously-developed structure of the M. truncatula NFP ectodomain. The predicted ligand-binding location and electrostatic surface potential are depicted in FIG. 18B.

Creation of Point Mutations in the Ectodomain of M. truncatula NFP

[0211] The M. truncatula NFP leucine residues L147 and L154 were replaced with aspartate residues. Aspartate is similar in size to leucine, but negatively charged where leucine is hydrophobic. Point mutants of NFP were engineered using site-directed mutagenesis. In particular, a double-mutated NFP was engineered where the leucine residues L147 and L154 were replaced with aspartate residues to create the mutant NFP L147D L154D. Point mutated versions of the NFP ectodomain were expressed and purified as described above.

### Binding Assays

[0212] The binding assay using NFP wild type (WT) was replicated seven times, while the binding assay using the NFP mutant NFP L147D L154D was replicated four times. A summary of results is shown in Table 8.

TABLE 8
Summary of binding assay results

| Protein | A (M−1 min−1) | D (min−1) | Kd (μM) | n |
|---|---|---|---|---|
| NFP WT | 57.5 ± 0.28 | 0.00149 ± 0.0000062 | 25.98 ± 0.21 | 7 |
| NFP | 468.4 ± 8.85 | 0.022 ± 0.00012 | 47.99 ± 1.01 | 4 |
| L147D | | | | |
| L154D | | | | |

### Biolayer Interferometry (BLI)

[0213] Binding of NFP WT and NFP L147D/L154D mutant to S. meliloti Nod factor LCO-IV was measured on an Octet RED 96 system (Pall ForteBio). S. meliloti Nod factor LCO-IV consists of a tetrameric/pentameric N-acetylglucosamine backbone that is O-sulfated on the reducing terminal residue, O-acetylated on the non-reducing terminal residue, and mono-N-acylated by unsaturated C16 acyl groups. Biotinylated ligand conjugates were immobilized on streptavidin biosensors (kinetic quality, Pall ForteBio) at a concentration of 125-250 nM for 5 minutes. The binding assays were replicated 7 times for the NFP WT, and 4 times for the NFP L147D/L154D mutant. Data analysis was performed in GraphPad Prism 6 software (GraphPad Software, Inc.). Equilibrium dissociation constants derived from the steady-state were determined by applying a non-linear regression (one site, specific binding) to the response at equilibrium plotted against the protein concentration. Kinetic parameters were determined by non-linear regression (association followed by dissociation) on the subtracted data. Results are shown in FIGS. 18C-18D. Table 9 summarizes the kinetic parameters of FIGS. 18C-18D, with goodness of fit described by the global fit R² on the mean value of each point, and number of replicates performed using independent protein preparations (n) indicated.

TABLE 9
Summary of BLI kinetic parameters

| | NFP WT | NFP L147D L154D |
|---|---|---|
| K_{d} (μM) | 12.7 ± 0.1 | 166.7 ± 4.2 |
| kₒₙ (M⁻¹s⁻¹) | 50.3 | 227.7 |
| k_{off} (s⁻¹) | 6.4 × 10⁻⁴ | 379.9 × 10⁻⁴ |
| R² | 0.99 | 0.99 |
| n | 7 | 4 |

[0214] Binding of A. thaliana CERK1 (AtCERK1) to chitopentaose (CO5) and chitooctaose (CO8) was measured in the same way. Results are shown in FIGS. 18E-18F.

### Complementation Assay

[0215] Construct assembly, plant growth conditions, hairy root transformations, nodulation and ROS assays were generally conducted as described in Bozsoki, et al. 2017 (Bozsoki, Z. et al. Proc. Natl. Acad. Sci. 2017 114: E8118-E8127). A general schematic of the construct is provided in FIG. 18H. The tested transgenes were the mutated LysM receptors described above.

### Results

[0216] Structural Characterization of the M. truncatula NFP Ectodomain

[0217] The structure of M. truncatula NFP was determined by molecular replacement using a homology model based on the inner low B-factor scaffold of A. thaliana CERK1. The complete structure of NFP (residues 33-233) was built this way, including four N-glycosylations that were clearly resolved in the 2.8 Å electron density map. NFP forms a compact structure where three classical βααβ LysM domains are tightly interconnected and stabilized by 3 conserved disulfide bridges (C3-C104, C47-C166 and C102-C164) (FIG. 18A). The disulfide connectivity pattern and the overall scaffold arrangement is shared with other LysM receptors involved in chitin defense signaling, supporting a common evolutionary origin of this class of receptors.

### Identification of Important Residues in the LysM2 Domain for Nod Factor Perception

[0218] FIG. 18B shows modelling of the M. truncatula NFP ectodomain bound to a Nod factor ligand with predicted chitin and fatty acid chain locations. Structural alignment of the M. truncatula NFP ectodomain with the ligand-bound ectodomain of A. thaliana CERK1 positions chitin in the LysM2 binding groove of M. truncatula NFP without any obvious clashes. Strikingly, the electrostatic surface potential revealed a hydrophobic patch on the NFP ectodomain that is located near the non-reducing moiety of the docked chitin molecule, which potentially could accommodate the fatty acid chain of the Nod factor ligand. Two leucine residues (L147 and L154) were identified as the residues that give this patch its hydrophobic character.

[0219] To test the contribution of these two residues to Nod factor binding, both residues were replaced with similarly sized but negatively charged aspartate residues to produce the NFP ectodomain double mutant L147D L154D. Interestingly, the double mutated NFP L147D L154D ectodomain bound S. meliloti Nod factor LCO-IV with approximately two times lower affinity; Kd of 48.0±1.0 μM (Table 8). Closer inspection of the binding kinetics revealed that the association (Kₒₙ) was almost unaffected whereas the dissociation (K_{off}) was approximately 15 times faster in the double mutant. These results show that the hydrophobic patch of the NFP ectodomain is stabilizing the Nod factor bound state, and that this stabilization is most likely occurring via the fatty acid chain. Docking the Nod factor fatty acid in this hydrophobic patch and the chitin backbone in the LysM2 binding site would place the sulphate and acetyl side groups facing K141.

[0220] Biochemical analysis of Nod factor binding to the hydrophobic patch mutant reveals that the double mutated NFP L147D L154D ectodomain bound S. meliloti Nod factor LCO-IV with 13-fold lower affinity (Kd of 166.7±4.2 μM) compared to the WT NFP ectodomain (FIGS. 18C-18D, Table 9). The association rate (kₒₙ) was 4.5-fold faster and the dissociation rate (k_{off}) was dramatically increased with 59-fold in the double mutant compared to the WT NFP ectodomain, suggesting that the hydrophobic patch had a strong stabilizing effect on Nod factor binding mediated by the acyl chain.

[0221] The binding kinetics of A. thaliana CERK1 binding to chitin fragments were measured as a comparison. As shown in FIGS. 18E-18F, fast association and dissociation rates were seen. These kinetics were reminiscent of the kinetics observed for the NFP ectodomain double mutant L147D L154D (FIG. 18D). The binding kinetics of the chitin receptor A. thaliana CERK1 to chitin fragments were clearly different than the binding kinetics of the Nod factor receptor NFP to Nod factors (FIG. 18C).

Complementation Test in M. truncatula nfp Mutants

[0222] FIG. 18I shows the results of complementation tests where the plants were inoculated with S. meliloti strain 2011. When M. truncatula nfp mutants were transformed with the wild type M. truncatula NFP gene, complementation was seen, which was defined as an average of 10 nodules per plant 6-7 weeks after inoculation with S. meliloti strain 2011. In contrast, roots transformed with the double mutant construct (L147D L154D) did not develop any nodules per plant 6-7 weeks after inoculation with S. meliloti strain 2011.

[0223] FIG. 18J shows the results of complementation tests where the plants were inoculated with S. medicae, which has been reported to nodulate Medicago with higher efficiency. The S. medicae results confirmed that the double mutant construct (L147D L154D) complemented poorly.

[0224] Together, the data provided evidence that the hydrophobic patch in the LysM2 domain of M. truncatula NFP (shown in FIG. 18G) was a conserved structural imprint critical for Nod factor perception and symbiotic signaling.

### Example 8: Engineering Specific LCO Perception

[0225] The following example describes engineering of the L. japonicus LysM receptor LYS11 to specifically perceive Nod factors. This was done using domain swaps, by measuring ligand binding, and by measuring nodulation to assess complementation.

### Materials and Methods

[0226] Expression and Purification of the Ectodomain of the L. japonicus LysM Receptor LYS11

[0227] The L. japonicus LYS11 ectodomain (residues 26-234 of SEQ ID NO: 255) was codon-optimized for insect cell expression (Genscript, Piscataway, USA) and cloned into the pOET4 baculovirus transfer vector (Oxford Expression Technologies). The native L. japonicus LYS11 signal peptide was replaced with the gp64 signal peptide to facilitate secretion and a hexa-histidine (6×His) tag was added to the C-terminus (L. japonicus LYS11-ecto (26-234), N-term gp64, C-term 6His). Recombinant baculoviruses were produced in Sf9 cells (Spodoptera frugiperda) using the FlashBac Gold kit (Oxford Expression technologies) according to the manufacturer's instructions with Lipofectin (ThermoFisher Scientific) as a transfection reagent. Protein expression was performed as follows. Suspension-cultured Sf9 cells were maintained with shaking at 299 K in serum-free MAX-XP (BD-Biosciences, discontinued) or HyClone SFX (GE Healthcare) medium supplemented with 1% Pen-Strep (10000 U/ml, Life technologies) and 1% CD lipid concentrate (Gibco). Protein expression was induced by adding recombinant passage 3 virus once the Sf9 cells reached a cell density of 1.0*10\hat{ }6 cells/ml. After 5-7 days of expression, medium supernatant containing L. japonicus LYS11 ectodomains was harvested by centrifugation. This was followed by an overnight dialysis step against 50 mM Tris-HCl pH 8, 200 mM NaCl at 277 K. The L. japonicus LYS11 ectodomain was enriched by two subsequent steps of Ni-IMAC purification (HisTrap excel/HisTrap HP, both GE Healthcare). For crystallography experiments, N-glycans were removed using the endoglycosidase PNGase F (1:15 (w/w), room temperature, overnight). As a final purification step, L. japonicus LYS11 ectodomain was purified by SEC on a Superdex 200 10/300 or HiLoad Superdex 200 16/600 (both GE Healthcare) in phosphate buffered saline at pH 7.2 supplemented to a total of 500 mM NaCl (for binding assays) or 50 mM Tris-HCl, 200 mM NaCl (for crystallography).

### Biolayer Interferometry (BLI)

[0228] Binding of L. japonicus LYS11 ectodomain and domain-swapped versions of L. japonicus LYS11 ectodomain to ligands was measured on an Octet RED 96 system (Pall ForteBio). The ligands used were CO5 chitin oligomer (corresponding to the backbone of S. meliloti Nod factor LCO-V), M. loti Nod factor LCO, and S. meliloti Nod factor LCO. S. meliloti LCO consists of a tetrameric/pentameric N-acetylglucosamine backbone that is O-sulfated on the reducing terminal residue, O-acetylated on the non-reducing terminal residue, and mono-N-acylated by unsaturated C16 acyl groups. M. loti LCO is a pentameric N-acetylglucosamine with a cis-vaccenic acid and a carbamoyl group at the non-reducing terminal residue together with a 2,4-O-acetylfucose at the reducing terminal residue. Biotinylated ligand conjugates were immobilized on streptavidin biosensors (kinetic quality, Pall ForteBio) at a concentration of 125-250 nM for 5 minutes. Data analysis was performed in GraphPad Prism 6 software (GraphPad Software, Inc.). Equilibrium dissociation constants derived from the steady-state were determined by applying a non-linear regression (one site, specific binding) to the response at equilibrium plotted against the protein concentration. Kinetic parameters were determined by non-linear regression (association followed by dissociation) on the subtracted data. The tested chimeric receptors are depicted as block diagrams in FIG. 19B, with L. japonicus LYS11 domains shown in black and L. japonicus NFR5 domains shown in grey, and the block diagrams are shown again above the binding assay results in FIGS. 19C-19E.

### Complementation Assay

[0229] The complementation assay was done as in Example 7. The tested chimeric receptors are depicted as block diagrams in FIG. 19F, where L. japonicus NFR5 domains are shown in light grey, L. japonicus LYS11 domains are shown in grey, and transverse lines across the block depicting the LysM2 domain indicate regions QLGDSYD (SEQ ID NO: 214) and GV (SEQ ID NO: 215) from L. japonicus NFR5. Empty vector and full-length L. japonicus LYS11 were used as negative controls (zero nodulation). Nodules were counted on hairy root transformed L. japonicus 0′5-2 mutant roots 35 days post inoculation with M. loti R7Å. M. loti R7A is the cognate N-fixing bacterial strain for L. japonicus.

### Results

[0230] Based on modelling and crystal structure determination of L. japonicus LYS11 ectodomain (FIG. 19A), it was predicted that the receptor would likely be a Nod factor receptor. To experimentally validate this prediction, binding experiments were performed. As shown in FIG. 19C, L. japonicus LYS11 ectodomain was able to bind CO5 (left graph), M. loti Nod factor LCO (middle graph; M. loti is the cognate N-fixing bacterial strain for L. japonicus), and S. meliloti Nod factor LCO (right graph; weak binding). This result indicated that the identified hydrophobic patch in the L. japonicus LYS11 ectodomain allowed it to bind Nod factor. Therefore, the hydrophobic patch was predictive of Nod factor-binding ability.

[0231] Next, it was tested whether stringent and specific Nod factor recognition could be engineered. For these tests, L. japonicus LYS11 ectodomains were engineered to contain parts of L. japonicus NFR5 receptors. Either the entire LysM2 domain or key residues from the LysM2 domain hydrophobic patch from L. japonicus LYS11 were replaced with the corresponding regions QLGDSYD (SEQ ID NO: 214) and GV (SEQ ID NO: 215) from L. japonicus NFR5, and ligand binding of these chimeric ectodomains was measured. As shown in FIG. 19D, replacing the entire LysM2 domain resulted in improved affinity to Nod factors (both M. loti and S. meliloti Nod factors), and resulted in a loss of ability to bind chitin. A similar result was seen when only key residues of the LysM2 domain were replaced (FIG. 19E).

[0232] Then, chimeric receptors were tested in planta. For these tests, the same chimeric L. japonicus LYS11 ectodomains were used (the entire LysM2 domain, or key residues from the LysM2 domain from L. japonicus LYS11 were replaced with the corresponding regions from L. japonicus NFR5) or the entire L. japonicus LYS11 ectodomain (LysM1, LysM2, and LysM3 domains) was used, and these were attached to the transmembrane domain (wavy shape in schematic of FIG. 19F) and kinase domain (oval shape in schematic of FIG. 19F) of L. japonicus NFR5. In addition, full-length L. japonicus NFR5 and full-length L. japonicus LYS11 were tested. As shown in FIG. 19F, chimeric receptors with any one of these modifications (the receptors fourth from right, third from right, and second from right) retained their capacity to perceive the M. loti Nod factor and to initiate a symbiotic signaling event with similar efficiency as L. japonicus NFR5.

[0233] Interestingly, the chimeric L. japonicus LYS11/NFR5 ectodomains had different Nod factor binding kinetics with slow on/off rates that resembled the binding kinetics of M. truncatula NFP. As shown in FIG. 20B, slow on/off rate binding kinetics are thought to be important for functional symbiotic signaling. The fast on/off rate binding kinetics seen with hydrophobic patch mutants does not result in symbiotic signaling (FIG. 20C). Further, fast on/off kinetics also appear to be a hallmark of chitin perception (FIG. 20A). As shown in FIG. 20D, M. truncatula NFP shared the cysteine bridge connectivity pattern and the overall arrangement of the scaffold with other LysM receptors involved in chitin defense signaling. This result supported the hypothesis that despite their different function, these LysM receptors shared a common evolutionary origin (Zhang, X.-C. et al. Plant Physiol. 2007 144, 623-636). The shared structural features of the LysM receptors provided further support for the ability to engineer these receptors to have different binding kinetics. For example, the altered binding kinetics observed with the chimeric L. japonicus LYS11/NFR5 ectodomains indicated that LysM receptors can be engineered to have Nod factor binding kinetics characteristics of functional symbiotic signaling.

[0234] Taken together, the results seen with chimeric L. japonicus LYS11/NFR5 ectodomains show that engineering the LysM2 domain hydrophobic patch can create receptors with higher stringency toward Nod factors as well as higher specificity toward Nod factors.

### Example 9: Exemplary Structural Alignment to Identify of Target Residues to Modify for Insertion of a Hydrophobic Patch

[0235] One of skill in the art would have no difficulty applying the teachings of this disclosure to genetically alter LysM receptors to include a hydrophobic patch or alter an existing hydrophobic patch. Exemplary steps would be:

1. Align the target LysM receptor amino acid sequence with one or more known Nod factor LysM receptor sequences to identify the sequence of the LysM1-3 domains in the target amino acid sequence. Known Nod factor LysM receptor sequences include: SEQ ID NO: 223, SEQ ID NO: 249, SEQ ID NO: 250, SEQ ID NO: 251, SEQ ID NO: 254, SEQ ID NO: 257, or SEQ ID NO: 258.

[0236] Applying this step to the H. vulgare LysM-RLK2/37-247 (SEQ ID NO: 248) sequence produced the following amino acid sequence:

>HvLysM-RLK2/37-247
SVEGFNCSANGTYPCQAYALYRAGLAGVPPDLSAAGDLFGVSRFMLAHAN
NLSTSAAPAAGQPLLVPLQCGCPSGSPNAYAPTQYQISSGDTFWIVSVTK
LQNLTQYQAVERVNPTVVPTKLEVGDMVTFPIFCQCPTAAQNATALVTYV
MQQGDTYASIAAAFAVDAQSLVSLNGPEQGTQLFSEILVPLRRQVPKWLP
PIVTRNDASAT

2. Use the LysM1-3 domain amino acid sequence as the input sequence to be modeled in an appropriate molecular modeling program such as SWISS-MODEL (Biasini 2014). SWISS-MODEL can be readily accessed at swissmodel.expasy.org under interactive # structure.
3. Input the structural template to the molecular modelling program, for example from a structural coordinate file (e.g., a pdb format file).

[0237] The H. vulgare LysM-RLK2/37-247 LysM1-3 domain amino acid sequence was entered into SWISS-MODEL as was the M. truncatula NFP receptor ectodomain crystal structure .pdb file (the atomic coordinates are reproduced at the end of the specification). The SWISS-MODEL program was run by the command ‘Build Model’. The M. truncatula NFP receptor ectodomain crystal structure was chosen as it has a known hydrophobic patch. One of skill in the art can readily select others based upon the teachings in this specification.

4. Optionally create an electrostatic surface potential of the target model and structurally align with a structure with chitin (or glycan) bound to the LysM2 domain to align the ligand binding grooves.

[0238] An electrostatic surface potential of the output target (.pdb) model generated with SWISS-MODEL was calculated using PDB2PQR & APBS webservers (PMID: 21425296) and visualized in PyMol using APBS tools 2.1 (DeLano, W. L. 2002). The A. thaliana CERK1 ectodomain structure (PDB coordinates 4EBZ) which has the chitin bound in the structure was aligned to the target model in PyMol. One of skill in the art would readily understand the position of the chitin binding domain as the LysM chitin binding motif is defined structurally in Liu et al. Science 2012 for A. thaliana CERK1. This aligned the chitin (C04) ligand in the LysM2 ligand binding groove of the target model. FIGS. 21A-21B show the PyMol visualization of the LysM1-3 domains of the H. vulgare LysM-RLK2/37-247 model with the LysM1, LysM2, and LysM3 domains labeled (FIG. 21A), and the electrostatic surface potential of the model with chitin modeled in the binding groove (FIG. 21B).

5. Select the residues from the alignment in the target model that align with the known hydrophobic patch.

[0239] From the sequence alignment (1), structural alignment of the target model with the crystal structure of M. truncatula NFP and the electrostatic surface potential information (5) the hydrophobic patch was identified (with the placed chitin from A. thaliana CERK1 as reference for locating the chitin (CO) binding groove as shown in (FIG. 21B). Hot-spot residues corresponding to the M. truncatula NFP ectodomain hydrophobic patch (L147, L151, L152, L154, T156, K157 and V158) were identified based on the amino acid being within 3 Å of an alpha carbon of a known hydrophobic patch amino acid residue (M. truncatula NFP L147, L151, L152, L154, T156, K157 and V158) in the structural alignment. As one of skill in the art would appreciate, residues like lysine (K) and arginine (R) that are not classically characterized as hydrophobic, do contain hydrophobic properties related to the Calpha, Cbeta, Cgamma, Cdelta and Cepsilon atoms that might be important for Nod factor (LCO) binding, selectivity, promiscuity, stringency, and affinity and therefore are still potentially important (e.g., K157 of the M. truncatula NFP hydrophobic patch). The identified residues in the H. vulgare LysM-RLK2/37-247 model (SEQ ID NO: 248) can be mutated, preferably with additional modeling, to obtain engineered Nod factor (LCO) binding, chitin/Nod factor (LCO/CO) selectivity, Nod factor (LCO) promiscuity, Nod factor (LCO) stringency, Nod factor (LCO) affinity. The M. truncatula NFP ectodomain crystal structure is disclosed in U.S. Prov. App. No. 62/718,282 and PCT App. No. PCT/EP2019/071705, published as WO 2020/035488, both of which are hereby incorporated by reference.

[0240] One of skill in the art would appreciate that similar structural modeling can be used to structurally align LysM1 domains to identify motifs in regions II, III, and IV in order to substitute and alter specificity, affinity and selectivity of a target LysM receptor for an agonist.

The application's sequence listing, which the Patent Office published only in electronic form, follows.

SEQUENCE LISTING (341 sequences)

SEQ ID NO: 1 - protein, 6 aa, Vigna angularis
GSNLTY

SEQ ID NO: 2 - protein, 6 aa, Vigna radiata
GSNLTY

SEQ ID NO: 3 - protein, 6 aa, Vigna unguiculata
GSNLTY

SEQ ID NO: 4 - protein, 6 aa, Phaseolus vulgaris
NSNLTY

SEQ ID NO: 5 - protein, 6 aa, Cajanus cajan
GSKLTY

SEQ ID NO: 6 - protein, 6 aa, Lupinus angustiiolius
GSTLTS

SEQ ID NO: 7 - protein, 6 aa, Lupinus albus
GSTLTS

SEQ ID NO: 8 - protein, 6 aa, Arachis ipaensis
GSNLTY

SEQ ID NO: 9 - protein, 6 aa, Arachis hypogaea
GSNLTY

SEQ ID NO: 10 - protein, 6 aa, Arachis duranensis
GSNLTY

SEQ ID NO: 11 - protein, 6 aa, Arachis hypogaea
GSNLTY

SEQ ID NO: 12 - protein, 6 aa, Abrus precatorius
GSNLTY

SEQ ID NO: 13 - protein, 6 aa, Glycine max
GSNLTY

SEQ ID NO: 14 - protein, 6 aa, Lotus japonicus
GSNLTY

SEQ ID NO: 15 - protein, 6 aa, Chamaecrista fascimIlata
GSNLTY

SEQ ID NO: 16 - protein, 6 aa, Mimosa pudica
GTNLTF

SEQ ID NO: 17 - protein, 6 aa, Prosopis alba
GSNLTY

SEQ ID NO: 18 - protein, 6 aa, Cicer arietinum
GANLTH

SEQ ID NO: 19 - protein, 6 aa, Pisum sativum
GTNLTY

SEQ ID NO: 20 - protein, 6 aa, Medicago truncatula
GSNLTY

SEQ ID NO: 21 - protein, 6 aa, Lupinus angustifolius
GSNLTY

SEQ ID NO: 22 - protein, 5 aa, Glycine max
GDLTY

SEQ ID NO: 23 - protein, 6 aa, Mimosa pudica
NITLSN

SEQ ID NO: 24 - protein, 5 aa, Prosopis alba
NNLGN

SEQ ID NO: 25 - protein, 6 aa, Spatholobus suberectus
GTNLTY

SEQ ID NO: 26 - protein, 6 aa, Artificial Sequence
  Synthetic Construct
  VARIANT 1: Xaa = Gly or Asn
  VARIANT 2: Xaa = Ser, Thr, Ala, or Ile
  VARIANT 3: Xaa = Asn, Lys, Thr, or Asp
  VARIANT 5: Xaa = Thr, Ser, or Gly
  VARIANT 6: Xaa = Tyr, Ser, Phe, His, or Asn
XXXLXX

SEQ ID NO: 27 - protein, 6 aa, Vigna angularis
KDSVQA

SEQ ID NO: 28 - protein, 6 aa, Vigna radiata
KDSVQA

SEQ ID NO: 29 - protein, 6 aa, Vigna unguiculata
KDSVQA

SEQ ID NO: 30 - protein, 6 aa, Phaseolus vulgaris
KDSVQA

SEQ ID NO: 31 - protein, 6 aa, Cajanus cajan
KDSVQA

SEQ ID NO: 32 - protein, 6 aa, Lupinus angustiiolius
KDSVQA

SEQ ID NO: 33 - protein, 6 aa, Lupinus albus
KDSVQA

SEQ ID NO: 34 - protein, 6 aa, Arachis ipaensis
KDSVQA

SEQ ID NO: 35 - protein, 6 aa, Arachis hypogaea
KDSVQA

SEQ ID NO: 36 - protein, 6 aa, Arachis duranensis
KDSVQA

SEQ ID NO: 37 - protein, 6 aa, Arachis hypogaea
KDSVQA

SEQ ID NO: 38 - protein, 6 aa, Abrus precatorius
KDSIQA

SEQ ID NO: 39 - protein, 6 aa, Glycine max
KDIIIA

SEQ ID NO: 40 - protein, 6 aa, Lotus japonicus
KDSVQA

SEQ ID NO: 41 - protein, 6 aa, Chamaecrista fascimIlata
KDSVPS

SEQ ID NO: 42 - protein, 6 aa, Mimosa pudica
KDSLSA

SEQ ID NO: 43 - protein, 6 aa, Prosopis alba
KDSVPA

SEQ ID NO: 44 - protein, 6 aa, Cicer arietinum
KDTIIA

SEQ ID NO: 45 - protein, 6 aa, Pisum sativum
KDIILG

SEQ ID NO: 46 - protein, 6 aa, Medicago truncatula
KDSVQA

SEQ ID NO: 47 - protein, 6 aa, Lupinus angustifolius
KDKVQP

SEQ ID NO: 48 - protein, 6 aa, Glycine max
KDLLPA

SEQ ID NO: 49 - protein, 4 aa, Mimosa pudica
NIQF

SEQ ID NO: 50 - protein, 7 aa, Prosopis alba
NGMYVQS

SEQ ID NO: 51 - protein, 6 aa, Spatholobus suberectus
PDVIQS

SEQ ID NO: 52 - protein, 7 aa, Artificial Sequence
  Synthetic Construct
  VARIANT 1: Xaa = Lys, Asn, or Pro
  VARIANT 2: Xaa = Asp, Gly, or none
  VARIANT 3: Xaa = Met or none
  VARIANT 4: Xaa = Ser, Ile, Thr, Lys, Leu, Asn, Tyr, or Val
  VARIANT 5: Xaa = Val, Ile, or Leu
  VARIANT 6: Xaa = Gln, Ile, Pro, Ser, or Leu
  VARIANT 7: Xaa = Ala, Ser, Gly, Pro, or Phe
XXXXXXX

SEQ ID NO: 53 - protein, 6 aa, Solanum lycopersicum
GSNLTL

SEQ ID NO: 54 - protein, 6 aa, Prunus persica
GSNLTL

SEQ ID NO: 55 - protein, 6 aa, Artificial Sequence
  Synthetic Construct
GSNLTL

SEQ ID NO: 56 - protein, 6 aa, Solanum lycopersicum
QDSVIA

SEQ ID NO: 57 - protein, 6 aa, Prunus persica
KDSVLA

SEQ ID NO: 58 - protein, 6 aa, Artificial Sequence
  Synthetic Construct
  VARIANT 1: Xaa = Gln or Lys
  VARIANT 5: Xaa = Ile or Leu
XDSVXA

SEQ ID NO: 59 - protein, 6 aa, Arabidopsis thaliana
GTTLSV

SEQ ID NO: 60 - protein, 6 aa, Hordeum vulgare
NVNVSY

SEQ ID NO: 61 - protein, 6 aa, Hordeum vulgare
DTNLTF

SEQ ID NO: 62 - protein, 6 aa, Hordeum vulgare
NQNVTY

SEQ ID NO: 63 - protein, 6 aa, Zea mays
NQNLTY

SEQ ID NO: 64 - protein, 6 aa, Zea mays
ESNLSF

SEQ ID NO: 65 - protein, 6 aa, Artificial Sequence
  Synthetic Construct
  VARIANT 1: Xaa = Asn, Asp, or Glu
  VARIANT 2: Xaa = Val, Thr, Gln, or Ser
  VARIANT 4: Xaa = Val or Leu
  VARIANT 5: Xaa = Ser or Thr
  VARIANT 6: Xaa = Tyr or Phe
XXNXXX

SEQ ID NO: 66 - protein, 5 aa, Marchantia paleacea
DDTLL

SEQ ID NO: 67 - protein, 5 aa, Marchantia polymorpha
DDTLL

SEQ ID NO: 68 - protein, 5 aa, Artificial Sequence
  Synthetic Construct
DDTLL

SEQ ID NO: 69 - protein, 6 aa, Arabidopsis thaliana
KDRIQM

SEQ ID NO: 70 - protein, 6 aa, Hordeum vulgare
LDYVAA

SEQ ID NO: 71 - protein, 6 aa, Hordeum vulgare
LDNAAA

SEQ ID NO: 72 - protein, 6 aa, Hordeum vulgare
LDYVVA

SEQ ID NO: 73 - protein, 6 aa, Zea mays
LDYIQA

SEQ ID NO: 74 - protein, 6 aa, Zea mays
PNYIVT

SEQ ID NO: 75 - protein, 6 aa, Artificial Sequence
  Synthetic Construct
  VARIANT 1: Xaa = Leu or Pro
  VARIANT 2: Xaa = Asp or Asn
  VARIANT 3: Xaa = Tyr or Asn
  VARIANT 4: Xaa = Val, Ala, or Ile
  VARIANT 5: Xaa = Ala, Val, or Gln
  VARIANT 6: Xaa = Ala or Thr
XXXXXX

SEQ ID NO: 76 - protein, 6 aa, Marchantia paleacea
PDSVEA

SEQ ID NO: 77 - protein, 6 aa, Marchantia polymorpha
PDSVEA

SEQ ID NO: 78 - protein, 6 aa, Artificial Sequence
  Synthetic Construct
PDSVEA

SEQ ID NO: 79 - protein, 6 aa, Vigna angularis
GLTLDD

SEQ ID NO: 80 - protein, 6 aa, Vigna radiata
GLSLDN

SEQ ID NO: 81 - protein, 6 aa, Vigna unguiculata
GMSLDV

SEQ ID NO: 82 - protein, 7 aa, Phaseolus vulgaris
GISTLDD

SEQ ID NO: 83 - protein, 7 aa, Glycine max
GYLLLEN

SEQ ID NO: 84 - protein, 7 aa, Spatholobus suberectus
GYFPLEN

SEQ ID NO: 85 - protein, 7 aa, Abrus precatorius
KFLSLDN

SEQ ID NO: 86 - protein, 7 aa, Cajanus cajan
GYLTVEN

SEQ ID NO: 87 - protein, 7 aa, Lotus japonicus
GVFILQN

SEQ ID NO: 88 - protein, 6 aa, Glycine max
DLSLEN

SEQ ID NO: 89 - protein, 6 aa, Arachis hypogaea
KVMLGS

SEQ ID NO: 90 - protein, 6 aa, Arachis ipaensis
KVMLGS

SEQ ID NO: 91 - protein, 6 aa, Arachis duranensis
GVMLGS

SEQ ID NO: 92 - protein, 6 aa, Arachis hypogaea
RVKLGS

SEQ ID NO: 93 - protein, 6 aa, Lupinus angustifolius
IVSLGN

SEQ ID NO: 94 - protein, 6 aa, Lupinus albus
TVSLGN

SEQ ID NO: 95 - protein, 6 aa, Lupinus angustifolius
SISLGN

SEQ ID NO: 96 - protein, 6 aa, Medicago truncatula
SIQLRN

SEQ ID NO: 97 - protein, 6 aa, Pisum sativum
LVELLN

SEQ ID NO: 98 - protein, 6 aa, Cicer arietinum
PFEFTN

SEQ ID NO: 99 - protein, 6 aa, Chamaecrista fasciculata
FFTLQN

SEQ ID NO: 100 - protein, 10 aa, Vigna angularis
SVVSNSDDII

SEQ ID NO: 101 - protein, 10 aa, Vigna radiata
SVVSNSDDII

SEQ ID NO: 102 - protein, 10 aa, Vigna unguiculata
SVVSNSDDII

SEQ ID NO: 103 - protein, 10 aa, Phaseolus vulgaris
SVVSNSDDIV

SEQ ID NO: 104 - protein, 10 aa, Glycine max
IVLSNSDVII

SEQ ID NO: 105 - protein, 10 aa, Spatholobus suberectus
SVLSNSDVVT

SEQ ID NO: 106 - protein, 10 aa, Abrus precatorius
KILSTSDVIR

SEQ ID NO: 107 - protein, 10 aa, Cajanus cajan
SVLSNSDVIK

SEQ ID NO: 108 - protein, 10 aa, Lotus japonicus
EIVSSNDAIT

SEQ ID NO: 109 - protein, 6 aa, Glycine max
SIEVII

SEQ ID NO: 110 - protein, 10 aa, Arachis hypogaea
NVVPNSNVII

SEQ ID NO: 111 - protein, 10 aa, Arachis ipaensis
NVVPNSNVII

SEQ ID NO: 112 - protein, 10 aa, Arachis duranensis
NVVPNSNVII

SEQ ID NO: 113 - protein, 10 aa, Arachis hypogaea
NVVPNSNVII

SEQ ID NO: 114 - protein, 10 aa, Lupinus angustifolius
NVLTNPNVVT

SEQ ID NO: 115 - protein, 10 aa, Lupinus albus
NVLTKSNVII

SEQ ID NO: 116 - protein, 10 aa, Lupinus angustifolius
NVLTNSDVII

SEQ ID NO: 117 - protein, 12 aa, Medicago truncatula
KIVLTNSFDVIM

SEQ ID NO: 118 - protein, 11 aa, Pisum sativum
KLVTNSSEVIV

SEQ ID NO: 119 - protein, 6 aa, Cicer arietinum
NSDIII

SEQ ID NO: 120 - protein, 10 aa, Chamaecrista fasciculata
KVLSDYQVIA

SEQ ID NO: 121 - protein, 5 aa, Vigna angularis
KNIFL

SEQ ID NO: 122 - protein, 5 aa, Vigna radiata
KNVFM

SEQ ID NO: 123 - protein, 5 aa, Vigna unguiculata
KNVFY

SEQ ID NO: 124 - protein, 5 aa, Phaseolus vulgaris
KNVLF

SEQ ID NO: 125 - protein, 5 aa, Glycine max
ENVLA

SEQ ID NO: 126 - protein, 5 aa, Spatholobus suberectus
DMVQS

SEQ ID NO: 127 - protein, 5 aa, Abrus precatorius
DNVPS

SEQ ID NO: 128 - protein, 5 aa, Cajanus cajan
DNLPS

SEQ ID NO: 129 - protein, 6 aa, Lotus japonicus
DINIQS

SEQ ID NO: 130 - protein, 5 aa, Glycine max
GYPLS

SEQ ID NO: 131 - protein, 5 aa, Arachis hypogaea
NLPVS

SEQ ID NO: 132 - protein, 5 aa, Arachis ipaensis
NLPVS

SEQ ID NO: 133 - protein, 5 aa, Arachis duranensis
NLPVS

SEQ ID NO: 134 - protein, 5 aa, Arachis hypogaea
NLPVS

SEQ ID NO: 135 - protein, 6 aa, Lupinus angustifolius
GDVMLA

SEQ ID NO: 136 - protein, 6 aa, Lupinus albus
GDVMLA

SEQ ID NO: 137 - protein, 6 aa, Lupinus angustifolius
GDVLLS

SEQ ID NO: 138 - protein, 6 aa, Medicago truncatula
KSGLIS

SEQ ID NO: 139 - protein, 6 aa, Pisum sativum
NDNLFS

SEQ ID NO: 140 - protein, 6 aa, Cicer arietinum
NGKLFS

SEQ ID NO: 141 - protein, 6 aa, Chamaecrista fasciculata
GVNIKS

SEQ ID NO: 142 - protein, 7 aa, Hordeum vulgare
NNLDYVV

SEQ ID NO: 143 - protein, 6 aa, Hordeum vulgare
TPNVNV

SEQ ID NO: 144 - protein, 8 aa, Lotus japonicus
NCLKGCDL

SEQ ID NO: 145 - protein, 12 aa, Lotus japonicus
PGVFILQNITTF

SEQ ID NO: 146 - skipped

SEQ ID NO: 147 - protein, 9 aa, Lotus japonicus
LNDINIQSF

SEQ ID NO: 148 - protein, 7 aa, Lotus japonicus
KCTHGCA

SEQ ID NO: 149 - protein, 11 aa, Lotus japonicus
NGSNLTYISEI

SEQ ID NO: 150 - protein, 10 aa, Lotus japonicus
SLLTKPEDIV

SEQ ID NO: 151 - protein, 9 aa, Lotus japonicus
ASKDSVQAG

SEQ ID NO: 152 - protein, 11 aa, Medicago truncatula
PSIQLRNISNF

SEQ ID NO: 153 - protein, 11 aa, Medicago truncatula
KIVLTNSFDVI

SEQ ID NO: 154 - protein, 9 aa, Medicago truncatula
FDKSGLISY

SEQ ID NO: 155 - protein, 38 aa, Artificial Sequence
  Synthetic Construct
MLLVNQSHQGFNKEHTSKMVSAIVLYVLLAAAAHSAFA

SEQ ID NO: 156 - protein, 10 aa, Lotus japonicus
IASKDSVQAG

SEQ ID NO: 157 - protein, 197 aa, Lotus japonicus
KCTHGCALAQASYYLLNGSNLTYISEIMQSSLLTKPEDIVSYNQDTIASKDSVQAGQRINVPFPCDCIEGEFLGHTFQYDVQKGDRYDTIAGTNYANLTTVEWLRRFNSYPPDNIPDTGTLNVTVNCSCGDSGVGDYGLFVTYPLRPGETLGSVASNVKLDSALLQKYNPNVNFNQGSGIVYIPAKDQNGSYVLLGS

SEQ ID NO: 158 - protein, 198 aa, Lotus japonicus
NCLKGCDLALASYYILPGVFILQNITTFMQSEIVSSNDAITSYNKDKILNDINIQSFQRLNIPFPCDCIGGEFLGHVFEYSASKGDTYETIANLYYANLTTVDLLKRFNSYDPKNIPVNAKVNVTVNCSCGNSQVSKDYGLFITYPIRPGDTLQDIANQSSLDAGLIQSFNPSVNFSKDSGIAFIPGRYKNGVYVPLY

SEQ ID NO: 159 - protein, 26 aa, Lotus japonicus
MEHPRLGFPITLLLFSFILLPSTSQS

SEQ ID NO: 160 - protein, 24 aa, Lotus japonicus
MKLKTGLLLFFILLLGHVCFHVES

SEQ ID NO: 161 - protein, 20 aa, Artificial Sequence
  Synthetic Construct
MVSAIVLYVLLAAAAHSAFA

SEQ ID NO: 162 - protein, 623 aa, Lotus japonicus
MKLKTGLLLFFILLLGHVCFHVESNCLKGCDLALASYYILPGVFILQNITTFMQSEIVSSNDAITSYNKDKILNDINIQSFQRLNIPFPCDCIGGEFLGHVFEYSASKGDTYETIANLYYANLTTVDLLKRFNSYDPKNIPVNAKVNVTVNCSCGNSQVSKDYGLFITYPIRPGDTLQDIANQSSLDAGLIQSFNPSVNFSKDSGIAFIPGRYKNGVYVPLYHRTAGLASGAAVGISIAGTFVLLLLAFCMYVRYQKKEEEKAKLPTDISMALSTQDGNASSSAEYETSGSSGPGTASATGLTSIMVAKSMEFSYQELAKATNNFSLDNKIGQGGFGAVYYAELRGKKTAIKKMDVQASTEFLCELKVLTHVHHLNLVRLIGYCVEGSLFLVYEHIDNGNLGQYLHGSGKEPLPWSSRVQIALDAARGLEYIHEHTVPVYIHRDVKSANILIDKNLRGKVADFGLTKLIEVGNSTLQTRLVGTFGYMPPEYAQYGDISPKIDVYAFGVVLFELISAKNAVLKTGELVAESKGLVALFEEALNKSDPCDALRKLVDPRLGENYPIDSVLKIAQLGRACTRDNPLLRPSMRSLVVALMTLSSLTEDCDDESSYESQTLINLLSVR

SEQ ID NO: 163 - protein, 620 aa, Medicago truncatula
MNLKNGLLLFILFLDCVFFKVESKCVKGCDVALASYYIIPSIQLRNISNFMQSKIVLTNSFDVIMSYNRDVVFDKSGLISYTRINVPFPCECIGGEFLGHVFEYTTKEGDDYDLIANTYYASLTTVELLKKFNSYDPNHIPVKAKINVTVICSCGNSQISKDYGLFVTYPLRSDDTLAKIATKAGLDEGLIQNFNQDANFSIGSGIVFIPGRDQNGHFFPLYSRTGIAKGSAVGIAMAGIFGLLLFVIYIYAKYFQKKEEEKTKLPQTSRAFSTQDASGSAEYETSGSSGHATGSAAGLTGIMVAKSTEFTYQELAKATNNFSLDNKIGQGGFGAVYYAELRGEKTAIKKMDVQASSEFLCELKVLTHVHHLNLVRLIGYCVEGSLFLVYEHIDNGNLGQYLHGIGTEPLPWSSRVQIALDSARGLEYIHEHTVPVYIHRDVKSANILIDKNLRGKVADFGLTKLIEVGNSTLHTRLVGTFGYMPPEYAQYGDVSPKIDVYAFGVVLYELITAKNAVLKTGESVAESKGLVQLFEEALHRMDPLEGLRKLVDPRLKENYPIDSVLKMAQLGRACTRDNPLLRPSMRSIVVALMTLSSPTEDCDDDSSYENQSLINLLSTR

SEQ ID NO: 164 - protein, 622 aa, Lotus japonicus
MEHPRLGFPITLLLFSFILLPSTSQSKCTHGCALAQASYYLLNGSNLTYISEIMQSSLLTKPEDIVSYNQDTIASKDSVQAGQRINVPFPCDCIEGEFLGHTFQYDVQKGDRYDTIAGTNYANLTTVEWLRRFNSYPPDNIPDTGTLNVTVNCSCGDSGVGDYGLFVTYPLRPGETLGSVASNVKLDSALLQKYNPNVNFNQGSGIVYIPAKDQNGSYVLLGSSSGGLAGGAIAGIAAGVAVCLLLLAGFIYVGYFRKKRIQKEELLSQETRAIFPQDGKDENPRSTVNETPGPGGPAAMAGITVDKSVEFSYDELATATDNFSLANKIGQGGFGSVYYAELRGERAAIKKMDMQASKEFLAELKVLTRVHHLNLVRLIGYSIEGSLFLVYEFIENGNLSQHLRGSGRDPLPWATRVQIALDSARGLEYIHEHTVPVYIHRDIKSANILIDKNYRGKVADFGLTKLTEVGSSSLPTGRLVGTFGYMPPEYAQYGDVSPKVDVYAFGVVLYELISAKDAIVKTSESITDSKGLVALFEGVLSQPDPTEDLRKLVDQRLGDNYPVDSVRKMAQLAKACTQDNPQLRPSMRSIVVALMTLSSTTDDWDVGSFYENQNLVNLMSGR

SEQ ID NO: 165 - protein, 69 aa, Lotus japonicus
SNCLKGCDLALASYYILPGVFILQNITTFMQSEIVSSNDAITSYNKDKILNDINIQSFQRLNIPFPCDC

SEQ ID NO: 166 - protein, 68 aa, Lotus japonicus
SKCTHGCALAQASYYLLNGSNLTYISEIMQSSLLTKPEDIVSYNQDTIASKDSVQAGQRINVPFPCDC

SEQ ID NO: 167 - protein, 70 aa, Medicago truncatula
SKCVKGCDVALASYYIIPSIQLRNISNFMQSKIVLTNSFDVIMSYNRDVVFDKSGLISYTRINVPFPCEC

SEQ ID NO: 168 - protein, 189 aa, Medicago truncatula
KCVKGCDVALASYYIIPSIQLRNISNFMQSKIVLTNSFDVIMSYNRDVVFDKSGLISYTRINVPFPCECIGGEFLGHVFEYTTKEGDDYDLIANTYYASLTTVELLKKFNSYDPNHIPVKAKINVTVICSCGNSQISKDYGLFVTYPLRSDDTLAKIATKAGLDEGLIQNFNQDANFSIGSGIVFIPGR

SEQ ID NO: 169 - protein, 187 aa, Phaseolus vulgaris
KCLKGCGAALASYYVSPGISTLDDITHLMKSSVVSNSDDIVSYNKDRIFNKNVLFFYRINIPFPCECIRDEFLGHVFEYSAAAGDTYDSIAKVTYANLTTVELLRRFNSYGQNDIPTNAKVNVTVNCSCGNSQVSQDYGLFITYPLRPGNNLHDIANETQLDAQLLQNYNPGVNFSQESGIVFIPGR

SEQ ID NO: 170 - protein, 186 aa, Arachis hypogaea
KCLKGCDLAIASYFVYPKVMLGSIASFMHSNVVPNSNVIISYNKDKMPNNLPVSFTRINIPFPCDCINGEFLGHVFEYSAIEGDTYDLIANMRYSDLTTVEILQRFNNYDPNHVPVNAKVNVTVNCSCGNSNVSKDYGLFVTFPLSEGNTLLQIANQTKLDPKLLQGYNPGVNFNQTRGIVFIPGR

SEQ ID NO: 171 - protein, 186 aa, Arachis hypogaea
KCLKGCDLAIASYFVYPRVKLGSIASFMHSNVVPNSNVIISYNKDKMPNNLPVSFTTINIPFPCDCINGEFLGHVFEYSAIEGDTYYLIANMRYSDLTTVEILQRFNNYDPNHVPVNAKVNVTVNCSCGNSHVSKDYGLFVTFPLSEGNTLLQIANQTKLDPKLLQSYNPGVNFNQTRGIVFIPGR

SEQ ID NO: 172 - protein, 186 aa, Cajanus cajan
MCVKECDVALASYYILPGYLTVENVTGWLESSVLSNSDVIKSYNKDKIIKDNLPSFDRINVPFPCDCIHEEFLGHVFEYSAAAGDTYDSIAKVTYANLTTVELLTRFNSYGHDIPQNAKINVTVKCSCGNSQVSKDYGLFITYPLRPGNNLHDIANEVHLDAQLLEKYNPGVNFSKDSGIVFIPGR

SEQ ID NO: 173 - protein, 184 aa, Cicer arietinum
KCVKGCDLALASYYIKPPFEFTNITNFMQSNSDIIISYNKQLVSNNGKLFSFSRINIPFQCECIQGEFLGHMFEYTTNEGDTYDLIANSYYASLTTIDLLQKFNKYDHNQTLPSKVKVNVTVNCSCGNSQISKEYGLFLTYPLRSSDTLQIIAIESKVDEVLIQNYNPNVNFSRGSGIVFIPGR

SEQ ID NO: 174 - protein, 187 aa, Abrus precatorius
KCMKGCHVALASYYVRPKFLSLDNIMRLMQSKILSTSDVIRSYNKDKILNDNVPSFSRVNIPFPCDCIGDEFLGHVFEYSTAAGDTYDLIAKVKYANLTTVELLQRFNSYDQDDIPANSKLNVTVNCYCGNSQISKDYGMFITYPLRPGNTLQDISNETNLDAHLLQSYNPGVNFSSESGIVFIPGR

SEQ ID NO: 175 - protein, 182 aa, Glycine max
KCVKGCDVAFASYYVSPDLSLENIARLMESSIEVIISFNEDNISNGYPLSFYRLNIPFPCDCIGGEFLGHVFEYSASAGDTYDSIAKVTYANLTTVELLRRFNGYDQNGIPANARVNVTVNCSCGNSQVSKDYGMFITYPLRPGNNLHDIANEARLDAQLLQRYNPGVNFSKESGTVFIPGR

SEQ ID NO: 176 - protein, 187 aa, Glycine max
KCVKGCDVALASYYVSPGYLLLENITRLMESIVLSNSDVIIYNKDKIFNENVLAFSRLNIPFPCGCIDGEFLGHVFEYSASAGDTYDSIAKVTYANLTTVELLRRFNSYDQNGIPANATVNVTVNCSCGNSQVSKDYGLFITYLLRPGNNLHDIANEARLDAQLLQSYNPGVNFSKESGDIVFIPGK

SEQ ID NO: 177 - protein, 189 aa, Lupinus angustifolius
KCIKGCDLALASYYVPVWPIVSLGNITSFMHSNVLTNPNVVTSYNKDKVFNGDVMLALYRTNVPFPCDCIGGEFLGHVFEYSAVEGDTYGLIAMKRYSNLTTVEILKRFNSYDPNHIPVNAKVNVTVKCSCGNSQISKDYGLFITYPLRPGNNLQELSKETKIDAKLLQSYNPGVNFSQENGIVFIPGK

SEQ ID NO: 178 - protein, 189 aa, Lupinus angustifolius
KCIKGCDLALASYYVSVWPSISLGNITNFMHSNVLTNSDVIISYNKGKIFNGDVLLSLTRTNVPFPCDCIGGEFLGHVFQYSSVAGDTYDTIAMKSYSNLTTVEFLKRFNSYDPNHIPVNSKVNVTINCSCGNSLISKDYGLFTTYPLRPGNNLQELSKETNIDAKLLQSYNPGANFSQESRIVFIPGR

SEQ ID NO: 179 - protein, 188 aa, Lotus japonicus
NCLKGCDLALASYYILPGVFILQNITTFMQSEIVSSNDAITSYNKDKILNDINIQSFQRLNIPFPCDCIGGEFLGHVFEYSASKGDTYETIANLYYANLTTVDLLKRFNSYDPKNIPVNAKVNVTVNCSCGNSQVSKDYGLFITYPIRPGDTLQDIANQSSLDAGLIQSFNPSVNFSKDSGIAFIPGR

SEQ ID NO: 180 - protein, 188 aa, Pisum sativum
KCVIGCDIALASYYVMPLVELLNITTFMQSKLVTNSSEVIVRYNRDIVFSNDNLFSYFRINIPFPCECIGGEFLGHVFEYTANEGDTYDLIANTYYASLTTVEVLKKFNSYDPNHIPAKAKVNVTVNCSCGNSQISKDYGLFITYPLRPRDTLEKIASHSKLDEGVIQSYNLGVNFSKGSGIVFFPGR

SEQ ID NO: 181 - protein, 186 aa, Vigna angularis
KCLKGCDLALASYYVSSGLTLDDITHLMKSSVVSNSDDIISYNKDKTFNKNIFLFDRINVPFPCDCIHDEFLGHVFEYSAAEGDTYDSIAKVEYADLTTVELLRRFNSYGQNGIPKNAKVNVTVNCSCGNSQVSQEYGLFITYPLRPDNNLHDIANEAHLDAQLLQNYNPGVNFSKESGIVFIPGR

SEQ ID NO: 182 - protein, 186 aa, Vigna radiata var. radiata
KCLKGCDLALASYYVNRGLSLDNITHLMKSSVVSNSDDIISYNKNKIFNKNVFMFNRYNVPFPCDCIRDEFLGHVFEYSAAEGDTYDSIAKVEYADLTTVELLRRFNSYGQNGIPKNAKVNVTVNCSCGNSQVSQEYGLFITYPLRPDNNLHDIANEAHLDAQLLQNYNPGVNFSKESGIVFIPGR

SEQ ID NO: 183 - protein, 186 aa, Vigna unguiculata
KCLKGCNVALGSYYVNTGMSLDVITPLMKSSVVSNSDDIISYNKDKIFNKNVFYFDRINVPFPCDCISDEFLGHVFEYSAAEGDTYDSIAKVEYADLTTVELLRRFNSYGQNGIPKNAKVNVTVNCSCGNSQVSQDYGLFITYPLRPGNNLHDIANEAHLDAQLLQNYNPGVNFSKESGIVFIPGR

SEQ ID NO: 184 - protein, 186 aa, Arachis duranensis
KCLKGCDLAIASYFVYPGVMLGSIASFMHSNVVPNSNVIISYNKDKMPNNLPVSFSRINIPFPCDCINGEFLGHVFEYSAIEGDTYDLIANLRYSDLTTVEILQRFNNYDPNHVPVNAKVNVTVNCSCGNSNVSKDYGLFVTFPLSEGNTLLQIANQTKLDPKLLQSYNPGVNFNQTRGIVFIPAR

SEQ ID NO: 185 - protein, 186 aa, Arachis ipaensis; identical to SEQ ID NO: 170

SEQ ID NO: 186 - protein, 188 aa, Chamaecrista fasciculata
MCIKGCDLALASYYIPLFFTLQNLTILLQSKVLSDYQVIASFNKDSIFNGVNIKSYQSINVPFPCDCIDGDFLGHVFEYTIANGDTYERIASRKYAMLTSVELLKKYNNYSDPNHLPINGKLNVTVNCYCGDRQISKDYGLFVTYPLRDGDSLQTIAEKTNLDLGLLERYNQGMNFSQGSGLVFYPGK

SEQ ID NO: 187 - protein, 189 aa, Mimosa pudica
KCHKGCPLALASYLCHQNITLSNITHLLKSNLVSLDFQIISSYNKEGIVPNNIQFFTRINIPFPCECINNDDFLGHVFEYTISKGDTYHSIATQTYSSLTSVDLLRRFNNYSDPNQLPPNGKLNVTVKCSCGNRQISKDYGLFITYPLGFEDSLESIVNQTGIDALLLQSYNPGANFSQQSGVVFIPGR

SEQ ID NO: 188 - protein, 189 aa, Lupinus albus
KCIKGCDIALASYYVPVWPTVSLGNITNYMYSNVLTKSNVIISYNKDKVFNGDVMLALYRTNIPIPCDCIGGEFLGHVFEYTAVAGDTYDLIAMKRYSNLTTVEFLKRFNSYDPNHIPVNAKVNVTVNCSCGNSLISKDYGLFITYPLRPGNNLQELSKETNIDAKLLQSYNPSVNFSQENGIVFIPGR

SEQ ID NO: 189 - protein, 187 aa, Spatholobus suberectus
KCVKGCDVALASYYVSPGYFPLENITRLMESSVLSNSDVVTSYNKDKIFNDMVQSFVRLNIPFSCGCIGGEFLGHVFEYSAAAGDTYDSIAKVTYANLTTVELLRRFNSYDQNDIPANAKLNVTVNCSCGNSQVSKDYGLFITYPLRPGNNLHDIANETQLDAQLLQSYNPGVNFSQESGIVFIPGR

SEQ ID NO: 190 - protein, 189 aa, Prosopis alba
KCLQGCPLALASYYAYKNNLGNITKFLRSDLVSDFGVVSSYNEGKVSNNGMYVQSLTRINIPFPCDCINNGDFLGHVFEYTIAEGDTYDSIATQTYSSLTTVDLLRRFNSYKDPNQLPLNGKLNVTVNCSCGDRQISKDYGLFLTYPLRFGDSLESIVDQTGIDATLLQKYNLRVNFSQESGVVFIPGR

SEQ ID NO: 191 - protein, 186 aa, Lotus japonicus
KCTHGCALAQASYYLLNGSNLTYISEIMQSSLLTKPEDIVSYNQDTIASKDSVQAGQRINVPFPCDCIEGEFLGHTFQYDVQKGDRYDTIAGTNYANLTTVEWLRRFNSYPPDNIPDTGTLNVTVNCSCGDSGVGDYGLFVTYPLRPGETLGSVASNVKLDSALLQKYNPNVNFNQGSGIVYIPAK

SEQ ID NO: 192 - protein, 186 aa, Phaseolus vulgaris
ACKEGCPLALGSYYMWQNSNLTYISQIMASSLLTTADDIVLYNKDTIPNKDSVQAFIRVNVPFPCDCIDGQFLAHTFKYDVQSQDSYEYVARTVYSNLTDVAWLRNFNSYEPDNIPDTATLNVTVNCSCGNSDVADYGLFITYPLRTGETLGSVAAAVSLDSGLLQRYNPGVNFNQGSGLVYIPGK

SEQ ID NO: 193 - protein, 186 aa, Arachis ipaensis
QCSKGCPLALASYYMWTGSNLTYVSQIMKSNVLSDPNGIVNYNKDTIPNKDSVQAFIRVNVPFPCDCINGEFLGHTFKYDIQSGDTYEHVATNNYANLTNVNWLRKFNTYPPNNIPNTGTLNVTVNCSCGNRQVANYGLFITYPLRPGDTLQAVAKNQSVDAFLLQKYNPSVNFNQGSGLVYIPGK

SEQ ID NO: 194 - protein, 186 aa, Arachis duranensis
QCSKGCPLALASYYMWTGSNLTYVSEIMKSNVLSDPNDIVNYNKDTIPNKDSVQASIRVNVPFPCDCINGEFLGHTFQYDIQSGDTYEHVATNNYANLTNVNWLRKFNSYPPNNIPDTGTLNVTVNCSCGNRQVANYGLFITYPLRPGDTLQAVAKNQSVDAFLLQKYNPSVNFNQGSGLVYIPGK

SEQ ID NO: 195 - protein, 186 aa, Cajanus cajan
ACKQGCPVALGSYYMWSGSKLTYISQIMPSALLTKPEDIVAYNKDTVPNKDSVQAFIRVNVPFPCDCVDQQFLAHTFQYDVQSQDTYDYVARTVFANLTDVAWLRRFNSYAPDNIPDTGTLNVTVNCSCGNSDVGGYGLFVTYPLRPGDTLGSVASSVGLDSGLLQRYNPGVNFNQGTGLVYIPGK

SEQ ID NO: 196 - protein, 186 aa, Cicer arietinum
KCTKGCSPALASYYLNSGANLTHISGIFSSSILTKPEDIVDYNQDTIANKDTIIAGKRINIPFPCDCIAGEFLAHTFSYDVQTGDTYETVATNNYANLTNVQWLQRFNSYPANNIPDTGTLNVTVNCSCGNSDVANYGLFLTYPLRPGETLGSVANSSNIDSSLLRSYNPGVNFNQGSGLVFIPGK

SEQ ID NO: 197 - protein, 186 aa, Abrus precatorius
KCTEGCPLALASYFLWRGSNLTYVSQIMASNVLTRPEDIVSYNKDTVPNKDSIQALSRVNVPFPCDCINGEFLGYTFKYDVQTGDTYETVAGTNYANLTNVAWLRRFNSYPPNNIPDTGTLNVTVNCSCGMSEVSNYGLFITYPLRPGETLGTVASSVGLDSALLQSYNPSVNFNQGSGLVFIPGK

SEQ ID NO: 198 - protein, 186 aa, Medicago truncatula
KCTKGCSLALANFYVSQGSNLTYISSIMRSNIQTRPEDIVEYSREIIPSKDSVQAGQRLNVPFPCDCIDGQFLGHKFSYDVETGDTYETVATNNYANLTNVEWLRRFNTYPPNDIPDTGTLNVTVNCSCGDADVGNYALFVTYPLRPGETLVSVANSSKVDSSLLQRYNPGVNFNQGSGIVFVPGK

SEQ ID NO: 199 - protein, 186 aa, Glycine max
ACKEGCGVALGSYYLWRGSNLTYISSIMASSLLTTPDDIVNYNKDTVPSKDIIIADQRVNVPFPCDCIDGQFLGHTFRYDVQSQDTYETVARSWFANLTDVAWLRRFNTYPPDNIPDTGTLNVTVNCSCGNTDVANYGLFVTYPLRIGDTLGSVAANLSLDSALLQRYNPDVNFNQGTGLVYVPGK

SEQ ID NO: 200 - protein, 186 aa, Glycine max
KCSRGCDLALASYYLSQGDLTYVSKLMESEVVSKPEDILSYNTDTITNKDLLPASIRVNVPFPCDCIDEEFLGHTFQYNLTTGDTYLSIATQNYSNLTTAEWLRSFNRYLPANIPDSGTLNVTINCSCGNSEVSKDYGLFITYPLRPEDSLQSIANETGVDRDLLVKYNPGVNFSQGSGLVYIPGK

SEQ ID NO: 201 - protein, 186 aa, Lupinus angustifolius
KCTQGCSLALASYYMYSGSTLTSISQVMSSQLLQIPEDIVTYNKDTIPNKDSVQAFIRVNVPFPCDCIDGEFLGHMFQYDVKTGDTYQLVAETEYANLTNIDWLMKFNSYPANNIPDTGTLNVTVNCSCGEKNVSNYGLFITYPLRPGDTLDSVSKSVDLDSGLLQRYNPGVNFNQGSGLVYIPGK

SEQ ID NO: 202 - protein, 180 aa, Lupinus angustifolius
KCTQGCPIALASYYMLSGSNLTYISQIMSSHVLHSPEDIVSYNKDKVQPFTRVNVPFPCDCIKGEFLGHMFQYVVQTGDTYETVAGTNYANLTNVEWLRRFNTYLPDNISSTGMLNVTVNCSCGNSDVSDYELFITYPLRPGETLGSVAKSVKLDSGLLQRYNPSVNFNQGSGLVYIPGK

SEQ ID NO: 203 - protein, 186 aa, Vigna angularis
ACKKGCSLALGSYYMWSGSNLTYISEVMSSSLLTTPDDIVLYNKDTIPNKDSVQAFIRVNVPFPCDCIDGQFLGHTFHYDVQTQDTYEQVARTVFSNLTDVTWLRRFNSYEPDNIPDTGTLNVTVNCSCGNTDVADYGLFVTYPLRTGETLGSVASDVSLDSGLLQRYNPDVNFNQGSGLVYIPGK

SEQ ID NO: 204 - protein, 186 aa, Vigna radiata
ACKQGCPLALGSYYMWSGSNLTYISEVMSSSLLTTPDDIVLYNKDTIPNKDSVQAFIRVNVPFPCDCIDGQFLAHTFQYDVQTQDTYEQVARVVFSNLTDVTWLRRFNTYEPDNIPDTGTLNVTVNCSCGNTDVADYGLFITYPLRTGETLGSVASDVSLDSGLLQRYNPDVNFNQGSGLVYIPGK

SEQ ID NO: 205 - protein, 186 aa, Vigna unguiculata
ACRQGCSLALGSYYMWSGSNLTYISEVMSSPLLTTPDDIVLYNKDTIPNKDSVQAFIRVNVPFPCDCIDGQFLAHTFQYDVQTQDTYEYVARTVFSNLTDVTWLRRFNSYEPNNIPDTGTLNVTVNCSCGNTDVADYGLFITYPLRTGETLGSVAADVSLDSGLLQRYNPDVNFNQGSGLVYIPGK

SEQ ID NO: 206 - protein, 186 aa, Arachis hypogaea; identical to SEQ ID NO: 194

SEQ ID NO: 207 - protein, 188 aa, Mimosa pudica
QCSESCDTALASYYVKNGTNLTFISKLMTSKLVSTPDDIVSYNKDKIPNKDSLSASIRINIPFPCDCINGQFLGHMFQYDVATGDTYDKIASTDFANLTTVEWLQKFNSYAADNIPDTATLNVTVNCSCGNRDVSDDYGLFITYPLLPGETLQSVASEVGFNDTGLLQRYNPSVNFNQGSGLVFLPGK

SEQ ID NO: 208 - protein, 187 aa, Chamaecrista fasciculata
KCSETCNLALASYYIQDGSNLTYISTILKSQLVSSPDDIVSYNKDKIPNKDSVPSDIRLNVPFPCDCIEDEFLGYNFLYDVQTGDTYERIARTNFANLTTVDWLQKFNSYPPNNIPDTGTLNVTINCSCGNRDVSKDYGLFITYPLMPGQTLQSVAQEVNLDTGLLQRYNPSVNFNQGSGLVYIPGK

SEQ ID NO: 209 - protein, 186 aa, Lupinus albus
KCKQGCSLALASYYMYSGSTLTSISQVMSSQLLTVPEDIVTYNKDTIPNKDSVQAFIRVNVPFPCDCINGEFLGHMFRYDVKTNDTYTSVAETEYANLTNVNWLMKFNNYPASNIPDTGTLNVTVNCSCGESSVSNYGLFITYPLRPGDTLDSVSKSVNLDSGLLQSYNPGVNFNQGSGLVYIPGK

SEQ ID NO: 210 - protein, 186 aa, Pisum sativum
KCTKGCSLALANFYLASGTNLTYVAGILKSPILTKPEDIVDYNRDTVPNKDIILGGERVNIPFPCDCINGDFLAHNFSYDVQTGDTYASVAGSNYANLTNVQWLRNFNTYPPNSIPDTGTLNVMINCSCGDREIADYGLFVTYPLRPGETLGSVANSTKLDSALLQRYNPGVNFNQGSGLVFIPGK

SEQ ID NO: 211 - protein, 186 aa, Arachis hypogaea; identical to SEQ ID NO: 193

SEQ ID NO: 212 - protein, 182 aa, Spatholobus suberectus
SCFTGCNLALASYYIWNGTNLTYISNLFGRPTSEILKYNPSVENPDVIQSQTRINVPFTCDCLNGVFLGHTFSFATQHGDTYKVIAEVGFSNLTTEDWVSRVNRYPPNQIPDNVNINVTVNCSCGDRHVSKDYGLFATYPLRVGDNLHRIAAESGVPAELLLRYNPTSDFSAGNGLVFVPAK

SEQ ID NO: 213 - protein, 187 aa, Prosopis alba
QCSETCDFALGSYYVRNGSNLTYVSKVMKSQLLSTPDDIVNYNKDKIPNKDSVPALTRVNVPFPCKCINGEFLGHTFQYVVETGDTYEKVAVTNYANLTTVDWLRKFNSYPPDNIPDTGTLNVTVNCSCGNSDVSKDYGLFITYPLRPGQTLQSVAGEAGLDTGLLQRYNPSVNFNQGSGLVYIPGK

SEQ ID NO: 214 - protein, 7 aa, Lotus japonicus
QLGDSYD

SEQ ID NO: 215 - protein, 2 aa, Lotus japonicus
GV

SEQ ID NO: 216 - protein, 621 aa, Medicago truncatula
MEHQPRFTSFISLPLFSIFLASIPFITESKCTKGCSLALANFYVSQGSNLTYISSIMRSNIQTRPEDIVEYSREIIPSKDSVQAGQRLNVPFPCDCIDGQFLGHKFSYDVETGDTYETVATNNYANLTNVEWLRRFNTYPPNDIPDTGTLNVTVNCSCGDADVGNYALFVTYPLRPGETLVSVANSSKVDSSLLQRYNPGVNFNQGSGIVFVPGKDQNGSFVFLGSSSGLGGGAIGGIAVGIVVVLLLVAAAIYFGYFRKKKIQKEELFSRDSTALFSQDGKDENSHGAANVTQRPGVMTGITVDKSVEFSYDELAAASDNFSMANKIGQGGFGSVYYAELRGEKAAIKKMDMQATKEFLAELKVLTRVHHLNLVRLIGYSIEGSLFLVYEYIENGNLSQHLRGSGRDPLPWATRVQIALDSARGLEYIHEHTVPVYIHRDIKPANILIDKNFRGKVADFGLTKLTEVGSSSLPTGRLVGTFGYMPPEYAQYGDVSPKVDVYAFGVVLYELISAKEAIVKSSESVADSKGLVGLFEGVLSQPDPTEDLRKIVDPRLGDNYPADSVRKMAQLAKACTQENPQLRPSMRSIVVALMTLSSTTDDWDVGSFYENQNLVNLMSGR

SEQ ID NO: 217 - protein, 617 aa, Zea mays
MARILMRLLLLAAAAAVAAGDGCLNSGCVALGSYLVARNQNLTYIASLFGIGDYHALARYNPGTTNLDYIQAGQSVNISFTCGCHTFPNSDATYLGGSFPHKVVTGDTYGGIAQNYNNLTSAAWLAVTNPYPTNNIPDTNTVVNVTVNCTCGDPKISSDYGFFLTYPLMGQTLAAVAANYSFNSSSQLDLLRKYNPGMDTATSGLVFIPVKDGNGSYHPLKPPGNGGSIGAIVGGVVGGVAILVLGVLLYIMFYRRKKANKAALLPSSEDSTQLATTSMDKSALSTSQADSSSGVPGITVDKSVEFSYEELFNATEGFSMSNKIGQGGFGAVYYAELRGEKAAIKKMDMQASHEFLAELKVLTHVHHLNLVRLIGFCTESSLFLVYEFIENGNLSQHLRGTGYEPLSWAARVQIALDSARGLEYIHEHTVPVYIHRDIKSANILIDKNYRAKVADFGLTKLTEVGNTSLPTRGIVGTFGYMPPEYARYGDVSPKVDVYAFGVVLYELISAKDAIVRSTESSSDSKGLVYLFEEALNTPDPKEGLQRLIDPALGEDYPIDSILKMTVLARACTQEDPKARPTMRSIVVALMTLSSTSEFWDMNAIQENQGVVNLMSGR

SEQ ID NO: 218 - protein, 626 aa, Hordeum vulgare
MEAPLHSLLLLLLLAAAAGPKTAAAVGDGCSRGCDLALASYYIAPNQNVTYIASLFGFSEYRVLGQYNPGVNNLDYVVAGDRLNVSLTCKCLASLSAPASTFLAASIPYKVATGETYLRIADNYNNLTTADWLVATNTYPANNIPDVATVNATVNCSCGDAGISTDYGLFLTYPLRDRETLASVAANHGFSSPEKMDLLKKYNPGMDGVTGSGIVYIPAKDPNGSYRPLESPGKKSSAGAIAGGVVAGVVALVLGVVLFLFYRRRKAKKDALLPSSEESTRLASAISMQKVTPSTSQADGASPAAGITVDKSVEFSYEELFNATEGFNIIHKIGQGGFGAVYYAELRGEKAAIKKMDMQATQEFLAELKVLTHVHHLNLVRLIGYCTESSLFLVYEFIENGNLSQHLRGTGYEPLSWVERVQIALDSARGLEYIHEHTVPVYIHRDIKSANILIDKNTRAKVADFGLTKLTEVGGGTSLQTRVVGTFGYMPPEYARYGDVSPKVDVYAFGVVLYELISAKDAIVRSAESTSDSKGLVYLFEEALSAPDPKEGIRRLMDPKLGDDYPIDAILKMTHLANACTQEDPKLRPTMRSVVVALMTLSSTSEFWDMNALYENPGLVNLMSGR

SEQ ID NO: 219 - protein, 613 aa, Oryza sativa Japonica Group
MFSLPALLIGACAFAAAAVAASGDGCRAGCSLAIAAYYFSEGSNLTFIATIFAIGGGGYQALLPYNPAITNPDYVVTGDRVLVPFPCSCLGLPAAPASTFLAGAIPYPLPLPRGGGDTYDAVAANYADLTTAAWLEATNAYPPGRIPGGDGRVNVTINCSCGDERVSPRYGLFLTYPLWDGETLESVAAQYGFSSPAEMELIRRYNPGMGGVSGKGIVFIPVKDPNGSYHPLKSGVGIVLLFCGMGNSLSGGAIAGIVIACIAIFIVAIWLIIMFYRWQKFRKATSRPSPEETSHLDDASQAEGIKVERSIEFSYEEIFNATQGFSMEHKIGQGGFGSVYYAELRGEKTAIKKMGMQATQEFLAELKVLTHVHHLNLVRLIGYCVENCLFLVYEFIDNGNLSQHLQRTGYAPLSWATRVQIALDSARGLEYLHEHVVPVYVHRDIKSANILLDKDFRAKIADFGLAKLTEVGSMSQSLSTRVAGTFGYMPPEARYGEVSPKVDVYAFGVVLYELLSAKQAIVRSSESVSESKGLVFLFEEALSAPNPTEALDELIDPSLQGDYPVDSALKIASLAKSCTHEEPGMRPTMRSVVVALMALTANTDLRDMDYHPF

SEQ ID NO: 220 - protein, 617 aa, Arabidopsis thaliana
MKLKISLIAPILLLFSFFFAVESKCRTSCPLALASYYLENGTTLSVINQNLNSSIAPYDQINFDPILRYNSNIKDKDRIQMGSRVLVPFPCECQPGDFLGHNFSYSVRQEDTYERVAISNYANLTTMESLQARNPFPATNIPLSATLNVLVNCSCGDESVSKDFGLFVTYPLRPEDSLSSIARSSGVSADILQRYNPGVNFNSGNGIVYVPGRDPNGAFPPFKSSKQDGVGAGVIAGIVIGVIVALLLILFIVYYAYRKNKSKGDSFSSSIPLSTKADHASSTSLQSGGLGGAGVSPGIAAISVDKSVEFSLEELAKATDNFNLSFKIGQGGFGAVYYAELRGEKAAIKKMDMEASKQFLAELKVLTRVHHVNLVRLIGYCVEGSLFLVYEYVENGNLGQHLHGSGREPLPWTKRVQIALDSARGLEYIHEHTVPVYVHRDIKSANILIDQKFRAKVADFGLTKLTEVGGSATRGAMGTFGYMAPETVYGEVSAKVDVYAFGVVLYELISAKGAVVKMTEAVGEFRGLVGVFEESFKETDKEEALRKIIDPRLGDSYPFDSVYKMAELGKACTQENAQLRPSMRYIVVALSTLFSSTGNWDVGNFQNEDLVSLMSGR

SEQ ID NO: 221 - protein, 620 aa, Lotus japonicus
MFYDFTTMASLTHPLCVLLTLMAAASFASVFSLEVSSKTTYMEPFNCSTKIRTCNSLLYHISIGLKVEEIARFYSVNLSRIKPITRGTKQDYLVSVPCTCRNTNGLNGYFYHTSYKVKVNDSFVDIQNLFYSGQAWPVNEDLVVPNETMTIHIPCGCSESGSQIVVTYTVQRNDTPLSIALLLNATVEGMVSVNSVMAPNPTFIDVGWVLYVPKELNPISHGKENKHKLEKIIGILAGVILLSIITLIILIVRRNRSYETCKDDPRAISKRSIGKRTSSLMNRDFHKEYMEDATSFDSERPVIYTLEEIEQATNDFDETRRIGVGGYGTVYFGVLGEKEVAIKKMKSNKSKEFYAELKALCKIHHINIVELLGYASGDDHLYLVYEYVPNGSLSEHLHDPLLKGHQPLSWCARIQIALDSAKGIEYIHDYTKAQYVHRDIKTSNILLDEKLRAKVADFGLAKLVERTNDEEFIATRLVGTPGYLPPESLKELQVTVKTDVFAFGVVMLELITGKRALFRDNQEANNMRSLVAVVNQIFQEDNPETALEVTVDGNLQRSYPMEDVYNMAELSHWCLRENPVDRPEMSEIVVKLSKIIMSSIEWEASLGGDSQVFSGVFDGR

SEQ ID NO: 222 - protein, 613 aa, Medicago truncatula
MASLIQLLSIFLPLLASSLPTIFSIEVSMKKAYMEPYKCSTKMRTCNASLYHINYNHNIEQIANFYSIDPSQIKPIIRSTKQDYLVKVPCSCKNIKDLSGYFYETTYKVSPNETSVDIMNLIYSGQAWQVNEDLVANENVTIHIPCGCSEFESQIVVTYTVQQSDTPTSISLLLNATIDGMVRINQILGPNPTFIDIGWVLYVPKELKGSPLYHGKEKKHKWVIIIGILVSVTLLSVITLIIFILRRNKAYETSKYDPKTVSKRSFGNRTISLRNHEFHKEYMEDATQFDSERPVIYDFEEIEHATNNFDETRRIGVGGYGTVYFGMLEEKEVAVKKMKSNKSKEFYAELKALCKIHHINIVELLGYASGDDHLYLVYEYVPNGSLSEHLHDPLLKGHQPLSWCARTQIALDSAKGIEYIHDYTKARYVHRDIKTSNILLDEKLRAKVADFGLAKLVERTNDEEFLATRLVGTPGYLPPESVKELQVTIKTDVFAFGVVISELITGKRALFRDNKEANNMKSLIAVVNKIFQDEDPVAALEAVVDGNLLRNYPIEGVYKMAELSHWCLSEEPVDRPEMKEIVVAVSKIVMSSIEWEASLGGDSQVFSGVFDGR

SEQ ID NO: 223 - protein, 595 aa, Lotus japonicus
  VARIANT 146, 150, 151, 153-158: Xaa = hydrophobic patch residues
  VARIANT 145, 147, 149, 152, 159: Xaa = residues immediately adjacent to hydrophobic patch residues
MAVFFLTSGSLSLFLALTLLFTNIAARSEKISGPDFSCPVDSPPSCETYVTYTAQSPNLLSLTNISDIFDISPLSIARASNIDAGKDKLVPGQVLLVPVTCGCAGNHSSANTSYQIQLGDSYDFVATTLYENLTNWNIVQASNPGVNPYLLPERVKVVFPLFCRCPSKNQLNKGIQYLITYVWKPNDNVSLVSAKFGASPADILTENRYGQDFTAATNLPILIPVTQLPELTQPSSNGRKSSIHLLVILGITLGCTLLTAVLTGTLVYVYCRRKKALNRTASSAETADKLLSGVSGYVSKPNVYEIDEIMEATKDFSDECKVGESVYKANIEGRVVAVKKIKEGGANEELKILQKVNHGNLVKLMGVSSGYDGNCFLVYEYAENGSLAEWLFSKSSGTPNSLTWSQRISIAVDVAVGLQYMHEHTYPRIIHRDITTSNILLDSNFKAKIANFAMARTSTNPMMPKIDVFAFGVLLIELLTGRKAMTTKENGEVVMLWKDMWEIFDIEENREERIRKWMDPNLESFYHIDNALSLASLAVNCTADKSLSRPSMAEIVLSLSFLTQQSSNPTLERSLTSSGLDVEDDAHIVTSITAR

SEQ ID NO: 224 - protein, 632 aa, Medicago truncatula
MKTLKPHHHQLSTFIFILLFPFLKSQTARQQNNTGYTCPNNNNNNNNTYPCQTYVYYKATPPNYLDLATISDLFQLSRLMISKPSNISSPSSPLLPNQPLLIPLTCSCNFINTTFGSISYSNITYTIKPNDTFFLVSTINFQNLTTYPSVQVVNPNLVATNLSIGDNAVFPIFCKCPDKTKTNSSFMISYVVQPHDNVSSIASMFGTSEKSIVDVNGERLYDYDTIFVPVTELPVLKQPSTIVPSPAPRGNSDDGDDDDDKSGIVKGLAIGLGILGFLLILVIVFWFYREVLFKKEKKGKGLYFGDKGYKGNDEKKKKMDVNFMANVSDCLDKYRVFGFDELVEATDGFDERFLIQGSVYKGEIDGQVYAIKKMKWNAYEELKILQKVNHGNLVKLEGFCIEPEESNCYLVYEYVENGSLYSWLHEDKNEKLNWVTRLRIAVDIANGLLYIHEHTRPKVVHKDIKSSNILLDSNMRAKIANFGLAKSGINAITMHIVGTQGYISPEYLADGIVSTKMDVFSFGIVLLELISGKEVIDEEGNVLWASAIKTFEVKNEQEKARRLKEWLDRTMLKETCSMESLMGVLHVAIACLNRDPSKRPSIIDIVYSLSKCEEAGFELSDDGFGSERLVAR

SEQ ID NO: 225 - protein, 423 aa, Arabidopsis thaliana
MKNPEKPLLLFLILASSLASMATAKSTIEPCSSKDTCNSLLGYTLYTDLKVTEVASLFQVDPVSMLLSNSIDISYPDVENHVLPAKLFLKIPITCSCVDGIRKSLSTHYKTRTSDTLGSIADSVYGGLVSPEQIQVANSETDLSVLDVGTKLVIPLPCACFNGTDESLPALYLSYVVRGIDTMAGIAKRFSTSVTDLTNVNAMGAPDINPGDILAVPLLACSSNFPKYATDYGLIIPNGSYALTAGHCVQCSCVLGSRSMYCEPASISVSCSSMRCRNSNFMLGNITSQQSSSGCKLTTCSYNGFASGTILTTLSMSLQPRCPGPQQLAPLIAPPDNVPKELMYLPSPSPSPSPEFDDIAGGGSSIAAVPAASPGGATVSSSNSIPGNPANGPGGSISIASCPLSYYSFIALLIPIGSCFFVF

SEQ ID NO: 226 - protein, 382 aa, Oryza sativa Japonica Group
PAPVSTRQSNKHQASHSHLSRRAFPTMASLTAALATPAAAALLLLVLLAAPASAANFTCAVASGTTCKSAILYTSPNATTYGNLVARFNTTTLPDLLGANGLPDGTLSSAPVAANSTVKIPFRCRCNGDVGQSDRLPIYVVQPQDGLDAIARNVFNAFVTYQEIAAANNIPDPNKINVSQTLWIPLPCSCDKEEGSNVMHLAYSVGKGENTSAIAAKYGVTESTLLTRNKIDDPTKLQMGQILDVPLPVCRSSISDTSADHNLMLLPDGTYGFTAGNCIRCSCSSTTYQLNCTAVQNKGCPSVPLCNGTLKLGETNGTGCGSTTCAYSGYSNSSSLIIQTSLATNQTTACQRGGSGRSQFARSMWSMSVISFHMVLIIICFL

SEQ ID NO: 227 - protein, 350 aa, Arabidopsis thaliana
METSCFTLLGLLVSLSFFLTLSAQMTGNFNCSGSTSTCQSLVGYSSKNATTLRNIQTLFAVKNLRSILGANNLPLNTSRDQRVNPNQVVRVPIHCSCSNGTGVSNRDIEYTIKKDDILSFVATEIFGGLVTYEKISEVNKIPDPNKIEIGQKFWIPLPCSCDKLNGEDVVHYAHVVKLGSSLGEIAAQFGTDNTTLAQLNGIIGDSQLLADKPLDVPLKACSSSVRKDSLDAPLLLSNNSYVFTANNCVKCTCDALKNWTLSCQSSSEIKPSNWQTCPPFSQCDGALLNASCRQPRDCVYAGYSNQTIFTTASPACPDSAGPDNYASTLSSSFNFVIVLIQCALLCLCLL

SEQ ID NO: 228 - protein, 638 aa, Zea mays
  VARIANT 145-158: Xaa = hydrophobic patch residues
  VARIANT 144, 159: Xaa = residues immediately adjacent to hydrophobic patch residues
MEPRHFCRALLLLLVVLLLGFRRAGAQDSTNYTVPARFACNVSSPCDTYVVYRTQSPGYLDLGSISDLFGTSQARIASANGLSSEDGVLQPGQPLLVPVRCGCTGAWSFANATYPIRQGDTFYNLARLSYENLTEYHLIHDLNPRSEPTSLQIGQEVTVPLLCRCPPARAVQSFITYVWQPGDTLSQVSKLMNATADEIAEANNVTSSSVSSASAAGLPMLIPVQQRPRLPPLLYAASAGEGRSSRSRRRALIIIGASVSGSLVALAALLVAIMAQRRYRRKKPSMRLGSPFAVNTKLSWSVNQYGHGSSNSFAHVMKGGKLLTGVSQFIDKPIIFVEEEIVEATMNLDERCKIGSTYYRAKLDGEVFAVKPAKGDVSAELRMMQMVNHANLIKLAGISIGADGDYAFLVYEFAEKASLDKWLYHNHQKPPSALLPSSSCTVPTTLSWGQRLSIALDVANGLLYMHEHTQPSMVHGDIRARNILLTADFRAKISSFSLAKPATADAAATSSDVFAFGLLLLELMSGRRAMEARIGSEIGMLWREIRAVLEAGDKREAKLRKWMDPALGSEYQMDAALSLAGMARACTDEDAARRPNMTEVVFSLSMLAQPLSVADGFEKLWQPSSEDNIRIAGSVAAR

SEQ ID NO: 229 - protein, 636 aa, Zea mays
  VARIANT 147-161: Xaa = hydrophobic patch residues
  VARIANT 146, 162: Xaa = residues immediately adjacent to hydrophobic patch residues
MELRHFRCCASRLLLLVTLLLGFRRAGAQDSTSYTVPAQFACDVSSPCDTYVVYRTQSPGYLDLGSISDLFGTSQARIASANGLSSEDGVLQPGQPLLVPVRCGCAGAWSFANVTYPIRQGDTFYNLAKASYENLTEYHLIQNLNPGSEPTSLQIGQEVTVPLLCRCPARAERSRGVQSLITYMWQAGDTMSQVSKLMNATVDEIAEANNVTANTSASASFVGQPMLIPVRQRPRLPAPLYAAAAADGKSRSRRRAAVIGASVSGSLVALAALFVAILARRRYRKKPSMRLGSRFAVNTKLSWSRNQFGHDGSNSFAHVMKGGKLLTGVSQFIDKPIIFVEEEIMEATMNLDERCKIGSTYYRAKLDGEVFAVKPAKGDVSAELKMMQMVNHANLIKLAGISIGADGDYAFLVYEFAEKGSLDKWLYEKPPSALPSSSCTVATLSWGQRLSIALDVANGLLYMHEHTQPSMVHDDIRARNILLTADFRAKISGFSLAKPAMVDAAATSSDVFAFGLLLLELLSGRRAMEARIGSEIGMLWREIRGVLETGDKREAKLRKWMDPALGSEYHMDVALSLASMARACTEEDAARRPNMTEVVFSLSVLAQPLSVADGFEKLWQPSSEDNIRIAGSVAAR

SEQ ID NO: 230 - protein, 633 aa, Hordeum vulgare
  VARIANT 144-157: Xaa = hydrophobic patch residues
  VARIANT 143, 158: Xaa = residues immediately adjacent to hydrophobic patch residues
MEPRRFLCCCLVAVLAVASRRCDAQGGAGNGTGRFACVVPAPCDTFVLYRTQSPGSLDLGAISDLFGVSRAMIAAANNLSLIDEDAALLPDQPLLVPVRCGCTGNRSFVNVTYPIHSGDTFYALALTGYENLTTPDVIQELNPQAVFNKLNVSQLVTVPLFCRCPTPAERSAGVLQQITYMWRPVDTMSRVSKLMGSDASAIAAANNVSADFTSTTMLPMLIPVARPPVLPPLRYGPSATTGDPGATKRFSGATVAASIAGSLVAVAALCVAIFGYRRYRRKKATVHSASRFASPRFCFNQNAYGIQSSSSIARMINGGDKLLTSVSQFIDKPVIFGTAEIMEATMNLDERCRIGSSYYRAKLEGEVFAVKPAKGDVSAELRMMQMVNHANLIRLAGISIGADGDYTFLVYEFAEKGSLDKWLYQKPPSSLPSSSSSVDTLSWNQRLGIALDVANGLLYMHEHTQPSMVHGDVRARNILLTADFRARISNFSVATPAMADAAATSSDVFAFGLLVLELLSGRTAMEARVGAEIGMLWRDIRAVLEAGDKRDAKLRKWMDPALGDEYYLDAALSLAGMARACTEEDAARRPKMADVVFSLSMLVQPLPVGDAFEKLWQPSSEENIRIVNEVAAR

SEQ ID NO: 231 - protein, 650 aa, Hordeum vulgare
  VARIANT 152-165: Xaa = hydrophobic patch residues
  VARIANT 151, 166: Xaa = residues immediately adjacent to hydrophobic patch residues
MAPLTRRRRLLATLLCLCALPAPARSQNASATPAPASVEGFNCSANGTYPCQAYALYRAGLAGVPPDLSAAGDLFGVSRFMLAHANNLSTSAAPAAGQPLLVPLQCGCPSGSPNAYAPTQYQISSGDTFWIVSVTKLQNLTQYQAVERVNPTVVPTKLEVGDMVTFPIFCQCPTAAQNATALVTYVMQQGDTYASIAAAFAVDAQSLVSLNGPEQGTQLFSEILVPLRRQVPKWLPPIVTRNDASATPPSPSPPPTTTPGPSDVADNRDGVVTGLAVGLGVVGGLWLLQLLLLGCLWRRLKAKGRRGDAVASGEGGEGGRSAKTASASGGVGGERFLVTDISEWLDKYRVFKVEELERGTDGFDDAHLIQGSVYKANIGGEVFAVKKMKWDACEELKILQKVNHSNLVKLEGFCINTATGDCFLVYEYVENGSLDLCLLDRGRARRLDWRTRLHIALDLAHGLQYIHEHTWPRVVHKDVKSSNVLLDARMRAKIANFGLAKTGHNAVTTHIVGTQGYIAPEYLVDGLVTTKMDVFAYGVVLLELVSGREAAGDGGDLLLADAEERVFRGREDRLEARAAAWMDPVLAEQTCPPGSVATVMGVARACLQRDPSKRPSMVDVAYTLSRADEYFADYSGESVSVDGSGEIAAR

SEQ ID NO: 232 - protein, 647 aa, Zea mays
MRPPALRLSALLLFLCLYAAPARSQNATTVTAAPASVEGFNCSVNRTYPCQAYALYRAGFAGVPLNLAAIGDLFAASRFMVAHANNLSTAAAPATGQPLLVPLQCGCPSGSPNSYAPMQYQIASGDTYWIISTTKLQNLTQYQAVERVNPTLVPTNLDVGTMVTFPIFCQCPAAADNATALVTYVMQPGDTYSTIAAAFSVDAQSLVSLNGPEPRTQQFAEILVPLRRQVPGWLPPIVLRNNASATPAAPPPSASPNATVVRNDRNGVVTGLAVGLGVVGALWLLQMLLLACLCRRLRANGRRGDAVLSGDGVEGGVFAKGSSAAAAGGGERFLVSDMSEWLDKYRVFTVEELERGTGGFDDAHLVNGSVYKANIDGLVFAVKKMKWDACEELKILQKVNHSNLVKLEGFCIDSATGDCYLVYEYVENGSLDLWLLDRDHARRLNWRARLHIALDLAHGLQYIHEHTWPRVVHKDMKSSNVLLDARMRAKIANFGLAKTGHNAITTHIVGTQGYIAPEYLADGLVTTKIDVFAYGVVLLELVSGREAADESGEPLWADAEDRVFRGRDERLEARVAAWMDPALAEQTCPLGSVATVVSVARACLHKDPSKRPSMVDVAYTLSKADEHFADYSGESVSVDGSGEIAAR

SEQ ID NO: 233 - protein, 670 aa, Hordeum vulgare
  VARIANT 162-174: Xaa = hydrophobic patch residues
  VARIANT 161, 175: Xaa = residues immediately adjacent to hydrophobic patch residues
MAAPPGRRGLAFGTAALALLAILAVARGQQQYEANAQTNCYGRNGSSVLGYVCNATAAAAPCATYVVFRSSPPYYGTAVSISYLLGSDPEAVADANGVPTVSPLADSRLVLAPVPCGCSPRGYYQHNSSHTIELRGETYFIIANNTYQGLTTCQALLAQNPRHGSRDLVAGNNLTVPIRCACPTPAQAAAGVRHLLTYLVTWGDSVSAIADRFRVDAQAVFQANNLTAREIIFPFTTLLIPLKSAPTPDMLVSPAPPPAPAPPQAQQPPASGSGKWIAVGVGVGVGVLALASLIGLMLLCVRRRRTRQGVRERGRLSKVVLDVPSSADYNALASGKHASSATTTSASSSALVSSDARAAVESLTVYKYSELEKATAGFSEDRRVKNASVYRAEINGDAAAVKRVAGDVSGEVGILKRVNHSSLVRLSGLCVHHGETYLVFEFAENGALSDWLHGGGATLVWKQRVQAAFDVADGLNYLHHYTNPPCVHKNLKSSNVLLDANLRAKVSSFALARSVPTGADGGDAQLTRHVVGTQGYLAPEYLEHGLITPKLDVFAFGVILLELLSGKEAMFNGGDKRGETLLWESAEGLVVDNEDARGKVRPFMDPRLHGDYPLDLAVAVASLAVRCVAREPRRRPSIDVVFATLSAVYNSTLDWDPSDDGNSRSSIVGR

SEQ ID NO: 234 - protein, 681 aa, Hordeum vulgare
  VARIANT 169-182: Xaa = hydrophobic patch residues
  VARIANT 168, 183: Xaa = residues immediately adjacent to hydrophobic patch residues
MATPTRWRGLAAVGRAALAFLVLLAVAAPWCPVARGQQEYEANAQNNCYGNNGSSVLGYTCNATAAVRPCASYVVFRSSPPYESPITISYLLNTTPAALADANAVPTVSSVAASRLVLAPLNCGCAPGGYYQHNASYTLQFSNETYFITANITYQGLTTCQALMAQNPNHDSRNLVVGNNLTVPIRCACPSPAQAASGVRHLLTYLVASGDTIADIATRFRVDAQAVLRANRLTDSENIYPFTTLLIPLKSAPTPDMLVSPAPPPAPVPPQAQQPLPTGGSGSGKGVAIGVGVGVGVLALAGLLGLMFLCVRRRRRLRPGVGENGHPGKVVIDVPSSADYDPLASGKHTSSATTTSSSSSAFVSSDARAAVESLTVYKYSELEKATAGFSEDRRVKDASVYRAVINGDTAAVKRVAGDVSGEVGILKRVNHSSLVRLSGLCVHHGDTYLVFEFAENGALSDWLHGGGATLVWKQRVQAAFDVADGLNYLHHYSTPPCVHKNLKSSNVLLDADLRAKVSSFALARSVPTGAEGGDAQLTRHVVGTQGYLAPEYLEHGLITPKLDVFAFGVILLELLSGKEATFNGGDKRGEKLLWESAEGLVVDGEDARSKVRAFMDPQLSGDYPLDLAVAVASLALRCVAREPRGRPSMYEVFVTLSAVYNSTLDWDPSDYSNSRSSIVGR

SEQ ID NO: 235 - protein, 680 aa, Zea mays
MAPPPQPELPAAALALLVLLLAAAVPARAQQEYEANKQNACYATNASSVLGYTCNATAASTPACESYLIFRSSPSYYNTPVSISYLLNSSPATVAAANAVPTVSPLAASSLVLVPVPCACTPGGYYQHNSSYTIEFQSETYFIIANITYQGLTTCQALIAQNPLHDSRGLVAGNNLTVPLRCACPSPAQAAKGFRYLLSYLVMWGDGVPSIAARFRVDPQAVLDANSLTADDIIFPFTTLLIPLKAAPTPDMLASPAPPPSPTPPQPTPAPSGGSGSGKWVGVGVGLGCGALALAAILGLLFLRTRRRRGQRFADGESVRQGSKVVIDVSSSAEYGALASGKQTSNTTTSTTSSATRSLVASDVRGAVESLTVYKYSELEKATAGFAEERQVPGTSVFRAVINGDAAAVKLVAGDVRDEVSILMRVNHSCLVRLSGLCVHRGDTYLVFEFAENGALSDWIHGGGGSTLRWRQRVQVAFDVADGLNYLHHYTNPPCVHKNLKSSNVLLDADLRAKVSSFGLARTVAASDGGAQLTRHVAGTQGYLAPEYLEDGLITPKLDVFAFGVVLLELLSGKEAAFADAGTGEETLLWEAAEEALVADGGEDVDRAKVRAFMDPRLHGDFPIDLALAMAALALRCVATEPRARPAMDEVFVSLTAVHNSTLDWDPSDYGTSGSSMVGR

SEQ ID NO: 236 - protein, 684 aa, Zea mays
MMASPPQTELQAVALALLVLLLAGAAPARAQQEYEANKQNACYATNASSVLGYTCNATTASTPACDSYLIFRSSPTYYNTPVSISYLLNSSVSATAAANAVPSVSPLAPSSLVLVPVPCACTPGGYYQHNSSYTIQFRGETYFIIANITYQGLTTCQALIAHNPLHDSRGLVAGNNLTVPLRCACPSPAQAAKGFKYLLSYLIMWGDDVTSIAARFRADPQAVLDANSLTADDIIFPFTTLLIPLKTAPTLDMLASTAPPPAPTPPQPAPAPSGRSGSGKLVGFGVGLGCGALALAGILGLLFLRARRRQRLPVGESVRQGSKVVIDVSSSADYGALASGKKITNTTTSSMSSAAWSLVASDVRGAVESLTVYKYSELEKATAGFAEEHQVPGTSVYRAVINGDAAAVKRLAGDVSGEVGILMRVNHSCLVRLSGLCVHRGDTYLVFEFAENGALSDWIHGGSGSCSGSNTLRWRQRVQVAFDIADGLNYLHHYTNPPCVHKNLKSSNVLLDADLRAKVSGFGLARAVTAAHGGAQLTGHVVGTQGYLAPEYLEDGLITPKLDVFAFGVVLLELLSGKEAGFADAGTGEEILLCESAEEALVADGGEDMDRAKVRAFMDPRLHGDFPMDLALSMAALALRCVAMEPRARPAMDEVFISLSAVYNSTMDCDPSDYGTSGSSMIGR

SEQ ID NO: 237 - protein, 723 aa, Zea mays
MNFSTWKTKEVQVRSFTTRKPTPQAACAMASFHDLTATAVLLLLFSILSGGLAPLQVQAQQPYGSQIADCTNQHNSSSLLGYFCGAAGSAPSCPTFLTFTARAQYSSLATIGALLGADPASVLAPNEATGADAPLPAGTRVLVPATCACTATPGGRFYQRNATYVAVAGDTLLIIANNTFQGLTSCQALEAQALRGAPPQSLDVGQSLPVPLRCACPSAAQAAAGARYLVSYLVDVFDDLTTVAARFGVDMGTVAASNQLQPPFTIDPYTTLLIPVSAQPNVSRIQTPPSPPPPPPVVARAPAPGKKSSNHVGVYIGVAVAVVVVAAIVSAGAFLAVRARRRRAGAVLATGEVAKKESKAGNDRAATSSGFTGGEFSLSTSEAFSSISVTDIKSSLKVYTYAELKAATDDFSPEHRIGGSVYRAAFNGDAAAVEVVDRNVSTEVEIMRKINHLNLIRLIGLCHHRGRWYLVTEYAEHGALRDRLLASATGTAAPLTWAQRVHIALDVAEGLRYLHEYARPAWVHMDVSSGSVLLAGDGPRAKLRGFGAARAITGATAGVDGEEGAEEALFTMTSRIAGTRGYIAPEYLEHGVVSPKADVYSLGVVLLELVTGRDAEELVGDGVGDPFVALRELAEELDGGGDAVLQRLEELVDPALPAGSCPQDAVVMVVRLIERCVRQDPARRPTTGEVAQRLLKLSGVSVVSWRNSPESPRSSGSGKGLMY

SEQ ID NO: 238 - protein, 587 aa, Zea mays
MTKHGLLFFLAIALLLHRHYTSASSTGQPTRSSSTASRSTAEWQPLHCSPVSSCGSFLYVTPGGRNLSEIASVFNGNASLIQPVKRLSGSEDLLMAVACECQAISNTTTAAAFLHDTQYKVEPDAIPDDVKSNTFSGLAMDVGDGFPLTPGATVTVRLPCGCSSSTASKGVLSYSVQEEDTLSTIASLFSSSPEAILNLNPSVKNPDFIKPGWILFVPMGVAGSSKKKRVGSTTITIAASVSAIILSVCVLTVILRLRRRPSQQNAEAPEIKMERAPNIDPFQTERPVIFSLKVVGDATANFDEKRKIGEGGYGSVYLGFIGTHEIAVKKMRASKSKEFFAELKALCKVHHINVVELIGYAAGDDHLYLVYEYVQNGSLSEHLHDPLLKGHQPLSWTARTQIALDAARGIEYIHDHTKACYVADFGLVKLVERSDEEEWVATRLVGTPGYLPPESVLELHMTTKSDVYAFGVVLAELITGLRALIRDNKEVNKTKSIISIMRKAFDSEDLERSLETIIDPNLKDSYPIEEVCKMANVSMWCLSEDPLNRPEMRDTMPALCQIHLASIEWEASLGGDGEVFSGVSYGR

SEQ ID NO: 239 - protein, 629 aa, Zea mays
MLYPHSAQQTRTAWTTRSRSRMDTACHHYTSASFTDQPSSIASAAEWQPLTCNAAVSNNPSCGSFLYVTPRGRTLSEVVSVFNGNASLIQPIKRLSGSEDLLVGVACKCEAINDTMTAFFHDTQYEVEPGDTPDNVKSNNFSGLAMNVGDGRTLIAGTTIAVHLPCGCSSTAPEGVLSYSVQEEDTLSTIASLFSSRQQDILNLNPILRNADFIRTGWILFIPMGVAGSSKKGIGSMRIIIAASVSAAVLLFCVLAVILRRRRRSSQHNVEAPEIKMERAPSNTSIAALESRFFPTMRTNDTDPFQTERPVIFSLKQVGDATADFSEKRKIGEGGYGSVYLGFIGAHEIAIKKMKASKSKEFFAELKALCKVHHINVVELIGYAAGDDHLYLVYEYVQNGSLTDHLHDPLLKGHQPLSWTARTQIALDAARGIEYIHDHTKACYVHRDIKTSNILLDNGLRAKVADFGLVKLVERSDEEEFVATRLVGTPGYLPPESVLELHMTTKSDVYAFGVVLAELITGLRALIRDNKEVNKTKSITSIMREVFKSEDLERSLETIIDPNLKDSYPIEEVCKMANVSMWCLSEDPLNRPETRDIMSTLGQIHLASIEWEASLCGDGEVFSGVSYGR

SEQ ID NO: 240 - protein, 612 aa, Hordeum vulgare
MARHSLFFFFLALSLQHLHISVGLPGRSLATATEQWQPMQCDAASLNASCSSYLYVTPQGRSLSEIASLFNGSASRTQPIKRLSGSEDLLVPVPCMCDAINDNMSGLFHDTAYKVNLNDTADNINSIFSGLAWNITATANTTITVHLLCGCSSTAPEGVISYMVQARDTLSNIATLFRSGSSEILSLNAGVTDPDFLQPGWILFIPMGVASSSKRKFGGLPIIIAVSISAAIMLLCTLTIVLRLRRRSLVPNAEVPKKEMERVPSNTSIAILESRYFPSKRIDDIDPFQTERPVIFSLKAVGEATANFDEKRKIGEGGYGMVYLGFIGTHEIAVKMMKDSKSKEFFAELKVLCKVHHINVVELIGYASGEDHLYLVYEYVQNGSLSEHLHDPLLKGHQPLSWTARTQIATDAARGIEYIHDHTKACYVHRDIKTSNILLDDGLRAKVADFGLVKLVERSDEEDCLATRLVGTPGYLPPESVRELHMTTKSDVYAFGVVLAELITGLRALVRDNKEANKTKSLISTMRKAFKSEDVESSLENIIDPSLKDNYPIEEVCKLANISMWCLSEDPLDRPEMREIMPMLSRIHLTSIEWEASLGGDHEVFSGVFNGR

SEQ ID NO: 241 - protein, 673 aa, Zea mays
MPPHRLLPLLLLLLPLGVSGAAAAGGNATSAPLPCSELSRVCTAFIAFPTAGAGPANATVLESMFDAAPGDLTADAAASPRYAFVRKNCSCLPSRTYLANTTYTIPSSATTSFPNTTAADVAAAAYSGLAVPPPGGAAQRPPRPGAVVALHLLCGCSSGPWNYLLTYVGVEGDTVESLSSRFGASMDAIETANAMAGPDPITAGKVYYIPLNSVPGQAYVTLPAPPAPAPAPTDYTLSGTPDYHSSKFPYGWVIGSMGVALALIVIAVLALVLWKFFGYKPQDRNGQRKSPDRHKFQLLKSGSFCYGSGRYLCCQFGNAKPTRADGGEHHINVPKGVAADVFDREKPIVFTHEEILISTDSFSDANLLGHGTYGSVYYGVLREQEVAIKRMMATKTKEFIVEMKVLCKVHHASLVELIGYAAGKDELFLVYEYSQNGSLKNHLHDPERKGCSSLSWIFRVQIALDAARGLEYIHEHTKDHYVHRDIKSSNILLDGSFRAKISDFGLAKLVVKSNDAEASVTKVVGTFGYLAPEYLRDGLATTKSDVYAFGVVLFELISGKEAITRAEGMGASSNSERCSLASVMLAAVRKCPNSTYMGNLKDCIDHNLRDLYPYDCAYKMAMLAKQCVDEDPVLRPDMKQVVITLSQILLSSIEWEATQAGNSQVFSGLVAGR

SEQ ID NO: 242 - protein, 722 aa, Hordeum vulgare
MPPRRRLLLLLLALACSGGGAAVDTAPGNGTSSPLACSELSRVCTAFLAFPAAGNASVLQSMFDASPGDLTSDPAASPGYAFVRKNCSCLASRTYLANTTYTIPSTVPLNATAAQVAAAAYGGLAVPPPGGALQRPPRPGAVVALHLICGCSSGPWNYLLSYVGSDGDTVESLSSRFGASMDAIEAANGMPGPDPITTGKVYYIPLNSVPGQPYVAMSSAPVPAPAPTQNTLSEISDHHSAKFPYGWVIGGMGVALALIAIALLALLMCKSFQYNHQGSNNQGKSPDQPMPHNFQLLKSGSFCYGSGRYFCCQFGNAKQSRKGGEDHHINVPKGMVVDVFDREKPIVFTYEEILASTDLFSDANLLGHGTYGSVYYGVLRDQEVAIKRMTSTNTKEFIVEMKVLCKVHHASLVELIGYAASKDELFLVYEYSQKGSLRNHLHDPQSKGYTSLSWIYRVQIALDAARGLEYIHEHTKDHYVHRDIKSSNILLDGSFRAKISDFGLAKLGLRSNDAEASVTKVVGTFGYLAPEYLRDGLATAKCDVYAFGVVLFELISGKEAITKADAVGASSNSERRSLASVVSFLTCTQAVIQSTACVFAVISLPKVYIGISSTSFYTSNLKDLSRFGLTGQMLTALRNCHDPTCVGSLKDCIDPNLMDLYPHDCIYQMAMLAKQCADEDPVLRPDMKQAVITLSQILLSSIEWEATLGGNSQVFSGLVAGR

SEQ ID NO: 243 - protein, 613 aa, Hordeum vulgare
MPPPPAYHHLLLLLLLLLRLHGAIASATGFTCTKPSTCQSAVIGYVVPNTITYKELISQFSPTTLHDVVAANQLPFNTATKQVIPPKTTLTIPFRCRCTGNGIGQSGLYIAQNKLDDGLATYQPEIVSSKSIADNAANWKGWIPLPCSCDGADVTHFPYIVRSGDSALAIAAKYGVLLSVLLEINNITNHASLYQGQVLDIPLQGKVGEELSSMGRWSRVYYISGYRKRRLGWFNSAAAEQSAHAAAEAVAATKEAAENSHYSPEAADTVVKRVLVLLLIIIILSLLYFTFYYWKSACESLSSRTNGVIQFYYSDLARATHRFSKESKIGEGQYGTVYKATIKGHEMAVKKLKAEGETKELHRELQTISNTKHTNLVSLKGWCGRLRLIDGKSCWKRQIKVELLLVFEWIPNGNLADHLHNREQVLSWEKRYKIVKGIGSALRYLHHECKPSILHRDIKPDNILLDYHFNAKLADFGLSMITDQNGATVFTIAIGPRRYMDPQLMKEGEFRFNHKSDIYSFGIVLLEIACTGKSRENILHILGGGSGQHVQVDGLADHRLSIFDRTEMARVVVLGLQCSHPDERQRPSMYMAMRFLEEGIELPIASHNRRERL

SEQ ID NO: 244 - protein, 416 aa, Arabidopsis thaliana
MKIPEKPIFLIFVSLILASSLTFTATAKSTIEPCSSNDTCNALLGYTLYTDLKVSEVASLFQVDPISILLANAIDISYPDVENHILPSKLFLKIPITCSCVDGIRKSVSTHYKTRPSDNLGSIADSVYGGLVSAEQIQEANSVNDPSLLDVGTSLVIPLPCACFNGTDNSLPAVYLSYVVKEIDTLVGIARRYSTTITDLMNVNAMGAPDVSSGDILAVPLSACASKFPRYASDFGLIVPNGSYALAAGHCVQCSCALGSRNLYCEPASLAVSCSSMQCRNSNLMLGNITVQQTSAGCNVTTCDYNGIANGTILTMLTRSLQPRCPGPQQFAPLLAPPDTVPRDVMYAPAPSPDFDGPGSIASSPRSSMLPGGGILPGNPANGPAGSISTASASSVSYFFITFLISIASFSLALSS

SEQ ID NO: 245 - protein, 415 aa, Lotus japonicus
MRMQQQQSTLLFLVVLLFHSLTTTTCKSTIEPCTNSDSCNALLGYTLYTDLKVSEVASLFGIDPISLLTANAIDISYPDAEHHILPPKLFLKIPISCSCVDGIRKSVSTSYKTRPSDTLSSIADSVYGGLVSADQLTDPSVLDVGQSLVVPLPCTCFNGSDNSLPAIYLSYVVQPVDSLAAIAARYLTTLTDLMNVNAMGSTAISDGDILAVPIPACASNFPKSASDFGLLVPNGSYAITAGHCVQCSCGPRNLNLYCMPTSLSASCSSMQCKNSNLMLGNVTAQQSSAGCNVSSCSYDGLVNGTIATTLSASLQPRCPGLQEFPPLVAPPTSVEKDPTFASGPAPSPSPQSHGSGLPSPKSSGMPGLPGFSPANGPVSGISSGASAACSLVKPSPTLTSALVLLLAMLVIPVAL

SEQ ID NO: 246 - protein, 394 aa, Lotus japonicus
MRNHLQFLWRHILVFLLLSVSYQVEAKSTIEPCSSGFPCPSLLSYILPWDSKLSEIATRFSVNVSNILAANSVFPITPSSGHQILSAKSIVKIPFSCPCVDGIRRSISTIYNVEASDTLASISEGYGGLVSAEQIKTMNSINETNPLTYGSSIVIPLPCKCLNNVNNGDTTVYMSYVVQKGQSLGSIATMYGTTVSDLESVNGLGQNAVDPGDILSVPVAACSSATLNWYSENLIVPNGSYILTASNCIQCTCTPRDLKMECLPSGMDVPCYNLHCKGSNLIIGNEYVEHSQTSCNVSQCVYRGHRGGKILSSIINSSYLQCPDNQSYSGPSRWPSLTPYAAEYPFDISPSPSSPPLPVSEAALRTRASGGWQGQSLINVMQLFLIKLILYFIM

SEQ ID NO: 247 - protein, 370 aa, Lotus japonicus
MGTVWLSKLVATTMLVAVLGLLAEAQIEAKFKCISENAPCHALADYSHPNGTTLRRIQTLFTVKYLPDILGANNLPANTTRVAPDQVIKVPFPCRCSNGTGLSNKVPRYKIKKGDTLYDIATTVFAGLVKYPQIQVANEIPDANNITAGDTIWIPLPCSCDAVAGSSVVHYAHLVQDGSSVESIAQEYGSTQQILLSLNGISDPKLLQARQLLDVPLQACSSSVKNDSPDYPLLVPNATYVYTAKECVKCKCDSSNNFRLQCEPSQHKPINDWSVCPSMECSKNVLIGNTTSTDSCNRTICDYAGYSNSKISTILATQNTCAVPPSGSGTSSGSGSGDSGSGASRSNLHGWVWSSPLIVIHFLLFVVFLL

SEQ ID NO: 248 - protein, 211 aa, Hordeum vulgare
  VARIANT 116-129: Xaa = hydrophobic patch residues
  VARIANT 115, 130: Xaa = residues immediately adjacent to hydrophobic patch residues
SVEGFNCSANGTYPCQAYALYRAGLAGVPPDLSAAGDLFGVSRFMLAHANNLSTSAAPAAGQPLLVPLQCGCPSGSPNAYAPTQYQISSGDTFWIVSVTKLQNLTQYQAVERVNPTVVPTKLEVGDMVTFPIFCQCPTAAQNATALVTYVMQQGDTYASIAAAFAVDAQSLVSLNGPEQGTQLFSEILVPLRRQVPKWLPPIVTRNDASAT

SEQ ID NO: 249 - protein, 595 aa, Medicago truncatula
  VARIANT 147, 151, 152, 154, 156-158: Xaa = hydrophobic patch residues
  VARIANT 146, 148, 150, 153, 155, 159: Xaa = residues immediately adjacent to hydrophobic patch residues
MSAFFLPSSSHALFLVLMLFFLTNISAQPLYISETNFTCPVDSPPSCETYVAYRAQSPNFLSLSNISDIFNLSPLRIAKASNIEAEDKKLIPDQLLLVPVTCGCTKNHSFANITYSIKQGDNFFILSITSYQNLTNYLEFKNFNPNLSPTLLPLDTKVSVPLFCKCPSKNQLNKGIKYLITYVWQDNDNVTLVSSKFGASQVEMLAENNHNFTASTNRSVLIPVTSLPKLDQPSSNGRKSSSQNLALIIGISLGSAFFILVLTLSLVYVYCLKMKRLNRSTSSSETADKLLSGVSGYVSKPTMYEIDAIMEGTTNLSDNCKIGESVYKANIDGRVLAVKKIKKDASEELKILQKVNHGNLVKLMGVSSDNDGNCFLVYEYAENGSLEEWLFSESSKTSNSVVSLTWSQRITIAMDVAIGLQYMHEHTYPRIIHRDITTSNILLGSNFKAKIANFGMARTSTNSMMPKIDVFAFGVVLIELLTGKKAMTTKENGEVVILWKDFWKIFDLEGNREERLRKWMDPKLESFYPIDNALSLASLAVNCTADKSLSRPTIAEIVLCLSLLNQPSSEPMLERSLTSGLDAEATHVVTSVIAR

SEQ ID NO: 250 - protein, 594 aa, Pisum sativum
  VARIANT 146, 150, 151, 154-159: Xaa = hydrophobic patch residues
  VARIANT 145, 147, 149, 152, 153, 160: Xaa = residues immediately adjacent to hydrophobic patch residues
MAIFFLPSSSHALFLALMFFVTNISAQPLQLSGTNFSCPVDSPPSCETYVTYFARSPNFLSLTNISDIFDMSPLSIAKASNIEDEDKKLVEGQVLLIPVTCGCTRNRYFANFTYTIKLGDNYFIVSTTSYQNLTNYVEMENFNPNLSPNLLPPEIKVVVPLFCKCPSKNQLSKGIKHLITYVWQANDNVTRVSSKFGASQVDMFTENNQNFTASTNVPILIPVTKLPVIDQPSSNGRKNSTQKPAFIIGISLGCAFFVVVLTLSLVYVYCLKMKRLNRSTSLAETADKLLSGVSGYVSKPTMYEMDAIMEATMNLSENCKIGESVYKANIDGRVLAVKKIKKDASEELKILQKVNHGNLVKLMGVSSDNDGNCFLVYEYAENGSLDEWLFSESSKTSNSVVSLTWSQRITVAVDVAVGLQYMHEHTYPRIIHRDITTSNILLDSNFKAKIANFSMARTSTNSMMPKIDVFAFGVVLIELLTGKKAITTMENGEVVILWKDFWKIFDLEGNREESLRKWMDPKLENFYPIDNALSLASLAVNCTADKSLSRPSIAEIVLCLSLLNQSSSEPMLERSLTSGLDVEATHVVTSIVAR

SEQ ID NO: 251 - protein, 598 aa, Glycine max
  VARIANT 144, 147, 148, 151-153, 155-161: Xaa = hydrophobic patch residues
  VARIANT 143, 145, 146, 149, 150, 154, 162: Xaa = residues immediately adjacent to hydrophobic patch residues
MAVFFPFLPLHSQILCLVIMLFSTNIVAQSQQDNRTNFSCPSDSPPSCETYVTYIAQSPNFLSLTNISNIFDTSPLSIARASNLEPMDDKLVKDQVLLVPVTCGCTGNRSFANISYEINQGDSFYFVATTSYENLTNWRAVMDLNPVLSPNKLPIGIQVVFPLFCKCPSKNQLDKEIKYLITYVWKPGDNVSLVSDKFGASPEDIMSENNYGQNFTAANNLPVLIPVTRLPVLARSPSDGRKGGIRLPVIIGISLGCTLLVLVLAVLLVYVYCLKMKTLNRSASSAETADKLLSGVSGYVSKPTMYETDAIMEATMNLSEQCKIGESVYKANIEGKVLAVKRFKEDVTEELKILQKVNHGNLVKLMGVSSDNDGNCFVVYEYAENGSLDEWLFSKSCSDTSNSRASLTWCQRISMAVDVAMGLQYMHEHAYPRIVHRDITSSNILLDSNFKAKIANFSMARTFTNPMMPKIDVFAFGVVLIELLTGRKAMTTKENGEVVMLWKDIWKIFDQEENREERLKKWMDPKLESYYPIDYALSLASLAVNCTADKSLSRPTIAEIVLSLSLLTQPSPATLERSLTSSGLDVEATQIVTSIAAR

SEQ ID NO: 252 - protein, 557 aa, Cicer arietinum
  VARIANT 146, 150, 151, 155-159: Xaa = hydrophobic patch residues
  VARIANT 145, 147, 149, 152, 154, 160: Xaa = residues immediately adjacent to hydrophobic patch residues
MSVFFLPSRSHVLFLALMLFLTNISAQSQHLSGTNFSCPVDSPPSCETYVTYIAQSPNFLSLTNISDLFDISPLSIARASNIDDEDKELIPGQVLLVPVTCGCTKHRSFANNTYTIKLGDSYILVSTTSYQNLTNYLEMEDSNPGLNPNLIPPFIKVVVPIFCRCPSKTQLNKGIKYLITYVWHANDNVSTVSSKFGASQVDILTENNYNQNFASAANLPVLIPVTRLPILAQPSSNGRKRSIQLPVIIDKLLSGVSGYVSKPTMYEMDVIMEATMNLSDQCKIGESVYKANIDGKVLAVKKTKKDASEELKILQKVNHGNLVKLMGVSSDNEGNCFLVYEYAENGSLDEWLFLESSKTSDSTVSLTWSQRIGIAVDVAVGLQYMHEHTYPRIIHRDITTSNILLDANFKAKIANFSMARTSTNPMMPKIDVFAFGVVLIELLTGKKGVTTKENGEVVIMWKDFWMIFDLEGNKEERLRKWMDPKLENFYPIDNALSLASLAVNCTADKSLSRPTIEEIVLCLNLLNQPSSEPTLERSLTFGLDVEDTQIVTSIAAR

SEQ ID NO: 253 - protein, 597 aa, Phaseolus vulgaris
  VARIANT 143, 146-148, 150-152, 154-160: Xaa = hydrophobic patch residues
  VARIANT 142, 144, 145, 149, 153, 161: Xaa = residues immediately adjacent to hydrophobic patch residues
MAVFFVSLTLGAQILYVVLMFFTCIEAQSQQTNGTNFSCPSNSPPSCETYVTYISQSPNFLSLTSVSNIFDTSPLSIARASNLQHEEDKLIPGQVLLIPVTCGCTGNRSFANISYEINQGDSFYFVATTLYQNLTNWHAVMDLNPGLSPFTLPIGIQVVIPLFCKCPSKNQLDRGIKYLITHVWQPNDNVSFVSNKLGASPQDILSENNYGQNFTAASNLPVLIPVTLLPDLIQSPSDGRKHRIGLPVIIGISLGCTLLVVVSAILLVCVCCLKMKSLNRSASSAETADKLLSGVSGYVSKPTMYETGAILEATMNLSEQCKIGESVYKANIEGKVLAVKRFKEDVTEELKILQKVNHGNLVKLMGVSSDNDGNCFVVYEYAENGSLQEWLFAKSCSETLNSRTSLTWCQRISIAVDVSMGLQYMHEHAYPRIVHRDITSSNILLDSNFKAKIANFSMARTFTNPMMSKIDVFAFGVVLIELLTGRKAMTTKENGEVVMLWTDIWKIFDQEENREERLRKWMDPKLDNYYPIDYALSLASLAMNCTADKSLSRPTIAEIVLSLSLLTQPSPATLERSLTSSGLDVEATQIVTSISAR

SEQ ID NO: 254 - protein, 595 aa, Arachis hypogaea subsp. hypogaea
  VARIANT 146, 149-151, 153-159, 161, 162: Xaa = hydrophobic patch residues
  VARIANT 145, 147, 148, 152, 160, 163: Xaa = residues immediately adjacent to hydrophobic patch residues
MAFFLPSLSSSIFLAFMLFSVTSIPTQSQQVNGTDFSCPVDSPSSCGTYVTYIAKSPNFLSLSNISDIFDTSPLSIARASNIKNEGDKLVPGQVLLIPVTCGCTQNQSFANITYELRQGDVYDIVSKTTYENLTNWRAVNNSNPDLNPVLLPIGVKVLFPLFCRCPSKKQLQKGIEYMITYVWQNNDNVSSVAAKFGASPVDILSENNYGGNFTAATYLPVLIPVTKLPVLTQPEASHGRKRSIQIPVIISISLGFTLVVAVIVISMVYAYLYQRKRTLNRGDLSAGTADKLLSGVSGYVSKPTVYEANEVIKATMNLSGQCKLGGTVYKAKIEGQVLAVKKVNQVVSEELNILQKVNHGNLVKLMGVSSDSDGNHFLVYEYADNGSLDGWLFSKLSLKASLTWYQRINIALDVAMGLQYLHEHTYPRIVHRDITTSNILLDSNFKAKIGNFSMVRTTTNPMISKIDVFAFGAVLIELLTGMKAMTTKADGEVVMLWKDIRKMFEVEDEKEKEECLRRWMDPKLECLYPVDYALSLATLAANCTADVSLSRPTMAEVVLGLSLLTQPSQAALERSLTSSALEAEVTHVATSITAR

SEQ ID NO: 255 - protein, 591 aa, Lotus japonicus
  VARIANT 146-160: Xaa = hydrophobic patch residues
  VARIANT 145, 161: Xaa = residues immediately adjacent to hydrophobic patch residues
MTSFFLFTNTLFLALMMFFSTTHHILAQLSHTNGTNFSCPVDSPPSCDTYVTYFAQSPNFLTLTSISDLFDTSPLSIARASNIKDENQNLVPGQLLLVPVTCACSGSNSFSNISHMIKEGESYYYLSTTSYENLTNWETVQDSNPNYNPYLLPVGIKVVIPLFCKCPSNYHLNKGIEYLITYVWHNNDNVSLVASKFGVSTQDIISENNFSHQNFTAATNFPILIPVTQLPSLSQSYSSSERKRSNHIHIIISIGISLGSTLLIALLVLVSVTCLRKRKSSENKSLLSVEIAGKKLISGVSNYVSKSILYEFRLIMEATLNLNEQCKIGESVYKAKLDGQVLAVKKVKEDVTEEVMILQKVNHLNLVKLMGVSSGHDGNHFLVYEFAENGSLHNWLFSNSSTGSRFLTWSQRISIAVDVAMGLQYMHEHTQPSIVHRDITSSNILLDSNFKAKIANFSVARTSINPMILKVDVFGYGVVLLELLSGKKSLTNNEINHIREIFDLKEKREERIRRWMDPKIESLYPIDDALSLAFLAMNCTSEKPLSRPTMGEVVLSLSLLMTQHSPTTLERSWTCGLDVDVTEMQTLIAAR

SEQ ID NO: 256 - protein, 590 aa, Medicago truncatula
  VARIANT 144-156: Xaa = hydrophobic patch residues
  VARIANT 143, 157: Xaa = residues immediately adjacent to hydrophobic patch residues
MVSSFFHTLIFFSATHILLQLPQANGKNFSCTLNSSPSCDTYVAYFANSPNFLTLTAISDIFDTSPQSIARASNIKDENMNLIHGQLLLIPITCGCNGNGNYSFANISHLIKESESYYYLSTISYQNLTNWQTVEDSNPNLNPYLLKIGTKINIPLFCRCPSNYFAKGIEYLITYVWQPNDNLTLVASKLGASPKDIITANTNNFGQNFTVAINLPVFIPVKNLPALSQSYYSSSERKRINHFSIIISIGICLGCTILISLLLLLFYVYCLRKRKACENKCVPSVEITDKLISEVSNYVSKPTVYEVGMIMKATMNLNEMCKIGKSVYKAKIDGLVLAVKNVKGHITVTEELMILQKVNHANLVKLVGVSSGYDGNHFLVYEYAENGSLYNWLLSEFCTLSWSQRLSIAVDIAIGLQYLHEHTQPCIVHRNIKSSNILLDSKFKAKIANFSVARTTKNPMITKVDVLGYGMVLMELITGKKFLSYSEHSEVNMLWKDFKCVFDTEQKREEIVRRWMDPKLGRFYNVVEALSLFTLAVNCIEEQPLLRPTMGEVVLSLSLLTQPSPTLLEVSWTYGLDVEVAEMVTPIIAR

SEQ ID NO: 257 - protein, 613 aa, Parasponia andersonii
  VARIANT 136-138, 142, 143, 145-151: Xaa = hydrophobic patch residues
  VARIANT 135, 139, 141, 144, 152: Xaa = residues immediately adjacent to hydrophobic patch residues
MAISLYLLLFFITHISAQSPPTLATNFSCSTNSSQPSCKTYVAYFAQPPLFMDLKSISNLFGVSPSSISEASNLVSESTKLTRGQLLLIPLSCSCNGSHYFSNVTYNITMGDSYYLVSIHSFENLTNWPLVRDTNPTLNPNLLQIGTKVIFPLYCGCPSKSHSKNGIKYLITYVWQPSDDIYRVSAMFNASEVDIIIENNYQDFKAAVGYPVLIPVSRMPALSQPPYPSHSHHRSQLKHRWFLIAVISSAGALLILFLATFLVHSIGLYEKKKNLSHEESSLETTDLIQVKNFSKSDTLELQAKHDKLLPGVSVYLGKPIMYEIKMIMEATMNFNDQYKIGGSVYRAMINGSFLAVKKAKENVTEELHILQKVNHGNLVKLMGISLDRDGNCFFVYEYAENGSLDKWLNPQSSTSTSSSVGILSWSQRLNIALDVANGLQYMHEHTQPSIVHKEIRTSNILLDSRFKAKIANFSMARSAASAGMTKVDVFAFGVVLLKLLSGRKAMATRENGEIVMLWKEAKAVLEEEEKRAEKVREWIDPKLESFYPIDGALSLMTLAKACTQEKASARPSIGEVVFSLCVLTQSFSETLEPSWTCTLEGEDVVQITSPIVA

SEQ ID NO: 258 - protein, 582 aa, Parasponia andersonii
  VARIANT 144-159: Xaa = hydrophobic patch residues
  VARIANT 143, 160: Xaa = residues immediately adjacent to hydrophobic patch residues
MADSYFPFQAIFLLLLLFSTLNMAASQLNNSATDFSCSDSPPSCEAYVAYFSQPPNYMNVGNISDLFGISQALIAKSSNLVSKDSPLIPQQLLLIPLTCTCTGNHYFANITYQVEPGDTYHYLSTLLFENLTNSQVMKKMNPEISPEYVLPYIDIIIPVFCRCPSKSHLKSEIQQFITYVWQPNDQVSNVSAKFNTSASEIVNENKYNNFSSAVGLPVLIPVSKLPVLARVKPPKSVRSKKQWILIGVESLGGIVLITLFATLLVYSNRLLKKRRKILEARRLEPRIIIQDKLLSGVSEYLGRPIMYDNKMVVEGTMDFSEQCRIGGSVYRGEIYGEVFAVKKTKQDITDELNLLQKVNHVNLVNLMGASYDTDGNRFLVYEYVENGSLERWLDLKPSSLAAASSSSSVQFLSWSQRIQIALDVANGLQYLHEHTQPNIAHWNIRTSTILLDSKFRAKIANFEVARPVGNPAMLKVDIFAFGIVLLALVSGKKALQTIENGEVIMLWKDLAKEVFEVEEKKEDRLRKWMDPNLQSFYPIDGALSLSSLARACIREKSSARPKMAEIVFSLSVLAQSSSPGTP

SEQ ID NO: 259 - protein, 620 aa, Malus domestica
  VARIANT 145-158: Xaa = hydrophobic patch residues
  VARIANT 144-159: Xaa = residues immediately adjacent to hydrophobic patch residues
MAISFLCSKPLCILLLLLFFTARILAQSTPSNSSTSFSCSVDAPPSCDTYVSYFARPQFMSLENISHLFGVSPLSIAKASNLVSEHIRLIAGQLLLVPISCGCSGNSYFSNITYEIKSGDSFYLVSINSFENLTDWHEVLNMNPTLDPSLLQIGQKVIFPLFCKCPSKMYTENGIKYHITYIWQPNDDISRVSSRFNVSTLDISSANNLHNDSAAVELPVVIPVSRLPALVQPKPPQGRNIFKQRWWLILIIILGGVLLVSSLLAIFAVYTRHQHKVKKALDGPGSSLESAEWFKMKEGKIDENFDLKFIQDKLLPGVSSYLGKPIMYEVKTIMEATMNLNEHCRIGGSVYRAIVDGQVLAVKNTKEDVTEELNILQKVNHANLVKLMGVSSETDGSRFLVYEYAANGSLDKWLYSKSSATSSSAELLTWNQRLSIALDIANGLQYMHEHTQRSIVHMDIRTSNILLDSKFKAKIANFSMARAAANDVTPKVDVFAFGVVLLALLSGKKGMEAKENGEAIMLWKDVRWVLEAEEEKVERLRKWMDPNLENFYPIDGALSLTALARACTQEKPSTRPSMGEVVFNLSVLTHSSSQSTLERSWTSALEAEEVLETISPIAAR

SEQ ID NO: 260 - protein, 624 aa, Fragaria vesca subsp. Vesca
  VARIANT 149-162: Xaa = hydrophobic patch residues
  VARIANT 148, 163: Xaa = residues immediately adjacent to hydrophobic patch residues
MAVSFLCSSMVCILLLFFFTSQILAQPAPQSNSTTSFSCAVDAPSSCETYVAYFVESPGYMNLENISDLFGVSVSSISQASNLASSYTGQTRLVAGQLLLVPITCGCTGNRSFANITYSIKRGDSYYVVSMYTFENLTRWPLVVEMNPALVPSLLQIGVKVIFPLFCKCPSKMYSDLGIKYLLTYVWQTNDDIFRVSAKFNISALNISGANNFDNGSPVVGQPVLIPLTKLPALSQPLPPHGKHIFKHRLMLIVIICLGVALSVASLLAIFLVHTHRLRKRQKLLNDKSLSLESAEWFRMKEGKSEEKIEMKFIQDKLLPGVSSYLGKAILYDVKTIMEATMNLNDHCGIGGSVYRAVIDGKVLAVKKTKEDVTEELNILQKVNHANLVKLMGISSEIDGVRFLVYEYAENGSLDKWLYHKTSTNSSSGAFLTWSQRLSIALDVANGLQYLHEHTQPSIVHMDIRTSNILLDSKYKAKIANFSMARTAANSVTPKVDVFSFGVILLSLLSGKKGMETTDNGEVIMLWKDVRGVLEAEEKKQEKLRAWMDPTLESFYPIDGALSLTALASACTQEKSSARPSMAEVVFNLSVLTHSSSESTLERSWNSALEVEEVLQTISPIKAR

SEQ ID NO: 261 - DNA, 1317 bp, Lotus japonicus
ggacatgagattgaagctccaaaattagctcttttttctgatgaatacttaatgctttgttgtattcacttgattaagtgctagaaatcatctttgcatgatcatagattaaatgaatttccagttggtgtgtggagagctattttgttatgctgacatctgcaatttgcagggcatctaatgattgtcatttcttaaattattattggttgtttccgtttctttaattatctgttttaatcttgcaggtcatacaaattaaaatactagccaccacccaagacatactaaatggggtagtagagggaagggtaaggtcgataaggatgactttttattctataaaatttaggagaatttgagcttaagtggcaaggcaaacgacattactatacgaattggctttgtaccagaaacagggaacaaataatattttacaaataagctattatcatgtcagctcatttgttcaactttgatttgattaaaaattaaatgaagttgaatttgttgagctgctttattatatatgccactggatgtttccgcattctaagtgcatgtttgaaaacatttctacaattgattacgaaggaaaaattaatcatggagagaagcttatgtgcgtagcttctgtatttctgaattgattctatctgtacagtagcatttagataatgaatgatcttggttctcgctaagcatcaaaccaatctctacccttttaaaattgcaagaattataagtcatgcattgacccaaatccttctgtggttatgccccttaaaaatccggcaagacatcaagttagttggtcattagggttccaccagctagctgacaccttgtacaacaactggccgtcctaaagttgggtaagcattacaatactaaatgccattttattatattttgcgcatggttatatacctaagtaggatttgtccacagtttctttgattcggaaaggaaaaaatatttagttgacactgacagaagcagattttatatacatatattatgaaatgactcctacatgagatacacgaatctcatccccatgagttgcagtttgacagagtacacacttatcaacttgctggaatataggaaagtctaaccaatgatgtcgatccgtattgccttaattttggtaaatttagtattacatgatcattattgatatactaaaccacaggatattttattgacaatgtgaatgttccatattttcaacaatgctgattccctctgataaagaacaagttccttttctctttccctgttaactatcatttgttccccacttcacaaaca

SEQ ID NO: 262 - DNA, 2000 bp, Artificial Sequence
  Synthetic Construct
aaataatgtgtctaaaattaacaaagatattttatggttaatttattgagcttagttaaagtcattttctaaaacgagacattgtagttgttagataaataatttcctttaattttcatcaaagtttgtaaataattatagggcaggacacatatgtccatcaattgatatatatatatcttttgtaataacgatcttatagaagaatcaatatctacaaagaaagttatcacttgtctcaaattatgctttatgcaactggtattgtcatgtagattccattttggtttatatgatattgaagtcaacgaatcacagctgcttaggcgtggttcataatttaaaattgaaactatggtgtttgttggaattatgagaggacagactgtgaagtggttgcacagctaccgacagggttgccattactgatgcaaaggattaaacaatagaacattttcaatcaacttaatctatgtttgacatcacgctcgatgtgtcagaatcacgacgacccactgtaatttttaaaaaaattacattttataatttttgtagaatcacggtgtatcacagtgattttgacatacccactgtaataccaaacatgcacttgcattctttcttccgtttgatgccaaaaatggtattgtttataatacacttaaaataattcatatccaagttgttgtataaaaaaataaacaatgtgatttcccaaaaaaaaaaaataataagtgattggcatgcaacatcagattttgttgtccaagtggtcacatttgaaatatttgagtttacatttttctcactaatatctttatattgaacttcaatctgtctagctataatcaaatggttgactaaaatggttaataagcttcaattaaattcaaattatttgaaagaacttgaatttaaatcttaacttgaacataaccccgaagtggatgatttacccaaaaaaattacctaactactctaataatcattttaacaataagagtattttactcaaagaaatttatataatcacaaaatcctagtatactcaatgattttcttaaaaaactattataaccagaaatgacaatatgagacaaatataattattttaataaaaatatctaaattagaattatttgaaaatgtaaaactatattattttttgtagttttccaaactttattaagcatcgtttaattgcacacaaaatttactccaattttttttagtctctgaaagttgctttttggtccatgttttagttttggtaattataattaagtttgttcatattaattagttctaatgtgtgtactatatagatcatactaattttgttcccaaactcatcttagttaggatctttgtatctactataagattaatccttgtgccgatataagaatatttgtcatgttatcaactatcacaatattgtattggtgagatcatataagatttgatgtcaacatcttcgtaaaggtgtcagattcgattctccccggtatcaatttaagtgagctaatttagcttcttaaaaaataaaatcaaacaacttttacataaactcagtgaaaacttggatataaagtatccttatactactctttagtcttgattagtctctgcaaagatatttatatgtactttgtattatcataagaacattcattgacattttaagttaatgaattactaacatgtcaactcttattctagccaacagttactttgttccctccacattctctttgaaatagtcaaacgtatccaatcatgcatgtctgttctgatcataacagcaaaagcatgtgtatagaaaattgatagttgaattagagtcattttccataaaaaaatattcaataagtgtgacattatttttcgtatgaattaatccattttttgctgatttgagattctttctttctttgcttcttgctttccttcatcagccattttttttgttttctctttctctctctcttcttgattca

SEQ ID NO: 263 - DNA, 1135 bp, Artificial Sequence
  Synthetic Construct
cgatccttcgttgtattcacttggtcaagtgcaagaaatcatctttacacaatcatataatgaatggacctttggttgatgtgttgagagctacattcagtcctctgctgacttctgcaacttgaggggaatctaatgattgtcttattgcaattaacaattccttttaattttttgacagaaagagttggttacaaaatctcatctaacatattgttgagttcctcttttttttttttttttttttttttgataaaagggtacatctgttcgcagctctgaagattaatccctcgaatagggttggataacatgaacgacaaatttgtttcttaagagttttaacactgtcatattcttatggcagaattcgaactcgaacccactggttaagctagaagtaagaagtgacccatgccatctcattcaatcgttcttggcttgttttcggtttagatgaatatgaagtacaaaaagctacgctcaagcaaaggagagcaggtaagaagggcatcttatttttttaatatattagatgtcaagcttacgtggcgatgtaaacactgtttctatccgaattagctatgtactagaaatagggaacaaataatataaatggtgagtttgtcaaggtgttttaatatattgaaaccaatgtaactggaagtgtcaacattgaaagctgttcattgcctgtattatattataattgcatatatataatggcattagcctttgttaaacgttaaaccatatcttttgctagtttgccccttaaaaatttggtaaaggcatcaagttagatggtctttaggtaccagccagctagttgacatcgtgtatggacaccaaattgggttataataccatattattcttaccatctttattatattctgcgcatgatttcatacttgtttgggatttgccaacagtgtctaagatttgaaaaagaaaaatagtagaactaatgacagagacatcagcatatatttttaatatcaaaccaaaagatatttgatgtccaaagaagagataaatataaagttagaagtatgacaataagtcttggttgttatttgccataagaaactctcttttctcttcccctcataatttgcatttcctcacaaca

SEQ ID NO: 264 - DNA, 2496 bp, Artificial Sequence
  Synthetic Construct
tcgactatataaggggttcctccatacctaataagacatgtttgtttcatgtcgatctacttactctattttatggttttctcgtgagcaatttacatataaaatacacattaaattgcacccaataactaactagttacaagattagagcacataaatcatggaatgaaacaatagcctatgacttgggtattcggtccacaacatctctagaagttcgtacaacaacgatcaaagagaaagtactgactagtgatatgagaaatttggtcaggaacaatgggctggacacattacgaacttgagcctgaatagtagcagcatatgtctgccttcgcaatgacgaagaaggttggacggagctaaagttaaagctggaagggtgtgtcgtggcatttgaaatttagggttcaactgtagctttgtttgtctaactacccttctagctttaataaaaaaacgtaaatcaattaattaaagagaaatcacgccaacctgtctcaaacccgctctaacttgttggttaaggttatgtgttgtatttcaatttgcttgttgcttcaacttgactccttacctcctttcatgttttttcttgaaaattgtgtaaactcagttttttttttttgagaatgtatgagaatgtgatacaaattaaaatacaaacatacattgaatgagcggggctaaaatgactcaaggtacatatgagttaagtttttaccaacccatctctttgatgagttgggtttaattgggttagctcacgtgttaactatttcgacaattctaactttttggaataatgccatccaaccctaggtaaaactcaacatgacttctcttaaagaaatgaagagtgaaagtctacataaatcttaaacacttaaaacactacaacttggtagatcattaaaatatgctccagaaataccataatacttgaaaataaataatttataaatgtaaaatataaatttgttgctgcacccaagtctgagtgaggaatgaataaagataaataaaatatatatatgcgttgatactaacatatgatatgatgtgatagatgtcatatataatgaacagaatgatagaaattgttgagcgcatggaagcttcttgttcaataattcaagagctgcttgtggagggctgctgcagggttgttatggatgcaattatcaaatatcttgctggaaattgatccaaaagttgactattaccttatcaatgtccggtgtccttcaagccaccattcaattagtcaataaccttttgtttttgtttttttataattttggtgccaaataattttaaccatttatttttatcatatatattatataagatggcaagtctataatcatttaaaattaaattagtctaaatttttctaatatgctgtataaatttattatatataagaataaataatattaaaaatattgtttaattgctaccagttcaatcattaattaactattgactgaaaagaaaaatgtctaacaaattttgttacattctgtttgttttgagaaaaaaaaaattgtttttcattttctgaaaatatttatttttaaatttattaaatttagaaattatgtttgtttttacgctttgttttcatcttcaccgtcaccaccatcgctaccactgtcgtcactattactatataccactaccatcgttgttgccgttgtcattgtcaacaccattgctgtcgtcgttgttattatcgccccacaaccactatcatcatcactgctatcgtcatagctaccacgaacaccaccatcacttttcattgaaaatgaaaaatgtttatttatttattttgattatattttaaaaaatatttttaatcaaccaaatttctttttaactttttttttcttatgaaaaaaaataatatgaaaagaacaaaccaaacagatccttatattcttgtttccattctttatcacccatgagagtagctgtagcgcgttaactttctaatagaggcgggaatttaccgttaaccgttgggtcatcactcagcttactgagtcatcttcttcctactgtaggcggaacccacacgccactgcctctctattattacatcaaattctattttttttacatcatcatcaagataaataaattgcattattcagaaattaattcctgaatctccctatcttaactcaggtgtctctagctattaccacttaagctattattagaagtctacgtcaaattctataataaacacatattcttattcttattattatactaatacaaaccttgatttgaagccaaaaatgataaaacaattgcagactcgttcaaacaacagacaacatgtaccattaaattccaccccaaattctcaaagcaaattctgaattctccaactagtttccattctcctagtcaactcaactcaaaacccagatgagaatgagataattccaactttaacaaacacacacaattcatcattca

SEQ ID NO: 265 - protein, 629 aa, Artificial Sequence
  Synthetic Construct
MEAPLHSLLLLLLLAAAAGPKTAAAVGDGCSRGCDLALASYYIAPGVFILQNITTFASLFGFSEYRVLGQYNPGLNDINIQSFDRLNVSLTCKCLASLSAPASTFLAASIPYKVATGETYLRIADNYNNLTTADWLVATNTYPANNIPDVATVNATVNCSCGDAGISTDYGLFLTYPLRDRETLASVAANHGFSSPEKMDLLKKYNPGMDGVTGSGIVYIPAKYKNGVYVPLYHRTKKSSAGAIAGGVVAGVVALVLGVVLFLFYRRRKAKKDALLPSSEESTRLASAISMQKVTPSTSQADGASPAAGITVDKSVEFSYEELFNATEGFNIIHKIGQGGFGAVYYAELRGEKAAIKKMDMQATQEFLAELKVLTHVHHLNLVRLIGYCTESSLFLVYEFIENGNLSQHLRGTGYEPLSWVERVQIALDSARGLEYIHEHTVPVYIHRDIKSANILIDKNTRAKVADFGLTKLTEVGGGTSLQTRVVGTFGYMPPEYARYGDVSPKVDVYAFGVVLYELISAKDAIVRSAESTSDSKGLVYLFEEALSAPDPKEGIRRLMDPKLGDDYPIDAILKMTHLANACTQEDPKLRPTMRSVVVALMTLSSTSEFWDMNALYENPGLVNLMSGR

SEQ ID NO: 266 - protein, 631 aa, Artificial Sequence
  Synthetic Construct
MEAPLHSLLLLLLLAAAAGPKTAAAVGDGCLKGCDLALASYYILPGVFILQNITTFMQSEIVSSNDAITSYNKDKILNDINIQSFQRLNIPFPCKCLASLSAPASTFLAASIPYKVATGETYLRIADNYNNLTTADWLVATNTYPANNIPDVATVNATVNCSCGDAGISTDYGLFLTYPLRDRETLASVAANHGFSSPEKMDLLKKYNPGMDGVTGSGIVYIPAKYKNGVYVPLYHRTKKSSAGAIAGGVVAGVVALVLGVVLFLFYRRRKAKKDALLPSSEESTRLASAISMQKVTPSTSQADGASPAAGITVDKSVEFSYEELFNATEGFNIIHKIGQGGFGAVYYAELRGEKAAIKKMDMQATQEFLAELKVLTHVHHLNLVRLIGYCTESSLFLVYEFIENGNLSQHLRGTGYEPLSWVERVQIALDSARGLEYIHEHTVPVYIHRDIKSANILIDKNTRAKVADFGLTKLTEVGGGTSLQTRVVGTFGYMPPEYARYGDVSPKVDVYAFGVVLYELISAKDAIVRSAESTSDSKGLVYLFEEALSAPDPKEGIRRLMDPKLGDDYPIDAILKMTHLANACTQEDPKLRPTMRSVVVALMTLSSTSEFWDMNALYENPGLVNLMSGR

SEQ ID NO: 267 - protein, 665 aa, Marchantia polymorpha
MIATGVITRRSPWVSSVMVVLVLAAASAWIPTSEGDCLPRLGCSRALAYYKLVNDDTLLALADRFMTNVAELQKYNDIPNPDSVEAGTVLFFPYTCECIDDRLGHEFLYQVALDDTVAQIAQIKYQFLSREAWITQASKLSSVGTIYPGLTVTVPVNCSCGDPSVSPDYGLFLTYPIRSGDNFTGIAQQFQANETLLQQYNPSINWSNLSPSTDIIFIPQRVFATGAYPAFNFSADVSEGGSKTNAGLIAGVSVGGALALVLAVVLFFLFCVYWPRQRHSDPSNKAAMESLRLDGSQSGDRRSALLKFSQEGAGHSRSSTGSGIPVGPIPLTDFTVDKSVEFSFEELEAATNKFSAANKIGEGGYGAVYFANLRGMKLAVKRMNLQATREFLAELQVLTHVHHTNLVQLIGYCTVDSLFLIYEYVDNGTLDRHLHGKNDLAPLSWSSRVQIALDAARGLEYIHEHTKPTYIHRDVKSSNILIDKQFHAKVADFGLTKLTESGVGSFSLTVPTRLVGTFGYMSPEYARFGDVSPKVDVYSFGVVLFEIISAKEAIVRISGTSADGAGQHKEEQRGLVTLFDEIVSDPDGKEKLRRLVDPALGDNYPLESAWKMAQLAGACTKENPELRPSMRTAVVALMTLSSTTQDWEMHAYGSERITPGLISGR

SEQ ID NO: 268 - protein, 663 aa, Artificial Sequence
  Synthetic Construct
MIATGVITRRSPWVSSVMVVLVLAAASAWIPTSEGDCLPRLGCSRALAYYKLVPGVFILQNITTFFMTNVAELQKLNDINIQSFGTVLFFPYTCECIDDRLGHEFLYQVALDDTVAQIAQIKYQFLSREAWITQASKLSSVGTIYPGLTVTVPVNCSCGDPSVSPDYGLFLTYPIRSGDNFTGIAQQFQANETLLQQYNPSINWSNLSPSTDIIFIPQRVFATGAYPAFNFSADVSEGGSKTNAGLIAGVSVGGALALVLAVVLFFLFCVYWPRQRHSDPSNKAAMESLRLDGSQSGDRRSALLKFSQEGAGHSRSSTGSGIPVGPIPLTDFTVDKSVEFSFEELEAATNKFSAANKIGEGGYGAVYFANLRGMKLAVKRMNLQATREFLAELQVLTHVHHTNLVQLIGYCTVDSLFLIYEYVDNGTLDRHLHGKNDLAPLSWSSRVQIALDAARGLEYIHEHTKPTYIHRDVKSSNILIDKQFHAKVADFGLTKLTESGVGSFSLTVPTRLVGTFGYMSPEYARFGDVSPKVDVYSFGVVLFEIISAKEAIVRISGTSADGAGQHKEEQRGLVTLFDEIVSDPDGKEKLRRLVDPALGDNYPLESAWKMAQLAGACTKENPELRPSMRTAVVALMTLSSTTQDWEMHAYGSERITPGLISGR

SEQ ID NO: 269 - protein, 670 aa, Artificial Sequence
  Synthetic Construct
MIATGVITRRSPWVSSVMVVLVLAAASAWIPTSEGDCLKGCDLALASYYILPGVFILQNITTFMQSEIVSSNDAITSYNKDKILNDINIQSFQRLNIPFPCECIDDRLGHEFLYQVALDDTVAQIAQIKYQFLSREAWITQASKLSSVGTIYPGLTVTVPVNCSCGDPSVSPDYGLFLTYPIRSGDNFTGIAQQFQANETLLQQYNPSINWSNLSPSTDIIFIPQRVFATGAYPAFNFSADVSEGGSKTNAGLIAGVSVGGALALVLAVVLFFLFCVYWPRQRHSDPSNKAAMESLRLDGSQSGDRRSALLKFSQEGAGHSRSSTGSGIPVGPIPLTDFTVDKSVEFSFEELEAATNKFSAANKIGEGGYGAVYFANLRGMKLAVKRMNLQATREFLAELQVLTHVHHTNLVQLIGYCTVDSLFLIYEYVDNGTLDRHLHGKNDLAPLSWSSRVQIALDAARGLEYIHEHTKPTYIHRDVKSSNILIDKQFHAKVADFGLTKLTESGVGSFSLTVPTRLVGTFGYMSPEYARFGDVSPKVDVYSFGVVLFEIISAKEAIVRISGTSADGAGQHKEEQRGLVTLFDEIVSDPDGKEKLRRLVDPALGDNYPLESAWKMAQLAGACTKENPELRPSMRTAVVALMTLSSTTQDWEMHAYGSERITPGLISGR

SEQ ID NO: 270 - protein, 621 aa, Artificial Sequence
  Synthetic Construct
MEHQPRFTSFISLPLFSIFLASIPFITESKCTHGCALAQASYYLLNGSNLTYISEIMQSSLLTKPEDIVSYNQDTIASKDSVQAGQRINVPFPCDCIDGQFLGHKFSYDVETGDTYETVATNNYANLTNVEWLRRFNTYPPNDIPDTGTLNVTVNCSCGDADVGNYALFVTYPLRPGETLVSVANSSKVDSSLLQRYNPGVNFNQGSGIVFVPGKDQNGSFVFLGSSSGLGGGAIGGIAVGIVVVLLLVAAAIYFGYFRKKKIQKEELFSRDSTALFSQDGKDENSHGAANVTQRPGVMTGITVDKSVEFSYDELAAASDNFSMANKIGQGGFGSVYYAELRGEKAAIKKMDMQATKEFLAELKVLTRVHHLNLVRLIGYSIEGSLFLVYEYIENGNLSQHLRGSGRDPLPWATRVQIALDSARGLEYIHEHTVPVYIHRDIKPANILIDKNFRGKVADFGLTKLTEVGSSSLPTGRLVGTFGYMPPEYAQYGDVSPKVDVYAFGVVLYELISAKEAIVKSSESVADSKGLVGLFEGVLSQPDPTEDLRKIVDPRLGDNYPADSVRKMAQLAKACTQENPQLRPSMRSIVVALMTLSSTTDDWDVGSFYENQNLVNLMSGR

SEQ ID NO: 271 - protein, 134 aa, Medicago truncatula
SETNFTCPVDSPPSCETYVAYRAQSPNFLSLSNISDIFNLSPLRIAKASNIEAEDKKLIPDQLLLVPVTCGCTKNHSFANITYSIKQGDNFFILSITSYQNLTNYLEFKNFNPNLSPTLLPLDTKVSVPLFCKC

SEQ ID NO: 272 - protein, 134 aa, Lotus japonicus
SGPDFSCPVDSPPSCETYVTYTAQSPNLLSLTNISDIFDISPLSIARASNIDAGKDKLVPGQVLLVPVTCGCAGNHSSANTSYQIQLGDSYDFVATTLYENLTNWNIVQASNPGVNPYLLPERVKVVFPLFCRC

SEQ ID NO: 273 - protein, 134 aa, Pisum sativum
SGTNFSCPVDSPPSCETYVTYFARSPNFLSLTNISDIFDMSPLSIAKASNIEDEDKKLVEGQVLLIPVTCGCTRNRYFANFTYTIKLGDNYFIVSTTSYQNLTNYVEMENFNPNLSPNLLPPEIKVVVPLFCKC

SEQ ID NO: 274 - protein, 138 aa, Glycine max
SQQDNRTNFSCPSDSPPSCETYVTYIAQSPNFLSLTNISNIFDTSPLSIARASNLEPMDDKLVKDQVLLVPVTCGCTGNRSFANISYEINQGDSFYFVATTSYENLTNWRAVMDLNPVLSPNKLPIGIQVVFPLFCKC

SEQ ID NO: 275 - protein, 65 aa, Arachis hypogaea subsp. hypogaea
CGCTQNQSFANITYELRQGDVYDIVSKTTYENLTNWRAVNNSNPDLNPVLLPIGVKVLFPLFCRC

SEQ ID NO: 276 - protein, 65 aa, Parasponia andersonii
CSCNGSHYFSNVTYNITMGDSYYLVSIHSFENLTNWPLVRDTNPTLNPNLLQIGTKVIFPLYCGC

SEQ ID NO: 277 - protein, 65 aa, Parasponia andersonii
CTCTGNHYFANITYQVEPGDTYHYLSTLLFENLTNSQVMKKMNPEISPEYVLPYIDIIIPVFCRC

SEQ ID NO: 278 - protein, 62 aa, Lotus japonicus
DCIEGEFLGHTFQYDVQKGDRYDTIAGTNYANLTTVEWLRRFNSYPPDNIPDTGTLNVTVNC

SEQ ID NO: 279 - protein, 62 aa, Phaseolus vulgaris
DCIDGQFLAHTFKYDVQSQDSYEYVARTVYSNLTDVAWLRNFNSYEPDNIPDTATLNVTVNC

SEQ ID NO: 280 - protein, 62 aa, Arachis ipaensis
DCINGEFLGHTFKYDIQSGDTYEHVATNNYANLTNVNWLRKFNTYPPNNIPNTGTLNVTVNC

SEQ ID NO: 281 - protein, 62 aa, Arachis duranensis
DCINGEFLGHTFQYDIQSGDTYEHVATNNYANLTNVNWLRKFNSYPPNNIPDTGTLNVTVNC

SEQ ID NO: 282 - protein, 62 aa, Cajanus cajan
DCVDQQFLAHTFQYDVQSQDTYDYVARTVFANLTDVAWLRRFNSYAPDNIPDTGTLNVTVNC

SEQ ID NO: 283 - protein, 62 aa, Cicer arietinum
DCIAGEFLAHTFSYDVQTGDTYETVATNNYANLTNVQWLQRFNSYPANNIPDTGTLNVTVNC

SEQ ID NO: 284 - protein, 62 aa, Abrus precatorius
DCINGEFLGYTFKYDVQTGDTYETVAGTNYANLTNVAWLRRFNSYPPNNIPDTGTLNVTVNC

SEQ ID NO: 285 - protein, 62 aa, Medicago truncatula
DCIDGQFLGHKFSYDVETGDTYETVATNNYANLTNVEWLRRFNTYPPNDIPDTGTLNVTVNC

SEQ ID NO: 286 - protein, 62 aa, Glycine max
DCIDGQFLGHTFRYDVQSQDTYETVARSWFANLTDVAWLRRFNTYPPDNIPDTGTLNVTVNC

SEQ ID NO: 287 - protein, 62 aa, Glycine max
DCIDEEFLGHTFQYNLTTGDTYLSIATQNYSNLTTAEWLRSFNRYLPANIPDSGTLNVTINC

SEQ ID NO: 288 - protein, 62 aa, Lupinus angustifolius
DCIDGEFLGHMFQYDVKTGDTYQLVAETEYANLTNIDWLMKFNSYPANNIPDTGTLNVTVNC

SEQ ID NO: 289 - protein, 62 aa, Lupinus angustifolius
DCIKGEFLGHMFQYVVQTGDTYETVAGTNYANLTNVEWLRRFNTYLPDNISSTGMLNVTVNC

SEQ ID NO: 290 - protein, 62 aa, Vigna angularis
DCIDGQFLGHTFHYDVQTQDTYEQVARTVFSNLTDVTWLRRFNSYEPDNIPDTGTLNVTVNC

SEQ ID NO: 291 - protein, 62 aa, Vigna radiata
DCIDGQFLAHTFQYDVQTQDTYEQVARVVFSNLTDVTWLRRFNTYEPDNIPDTGTLNVTVNC

SEQ ID NO: 292 - protein, 62 aa, Vigna unguiculata
DCIDGQFLAHTFQYDVQTQDTYEYVARTVFSNLTDVTWLRRFNSYEPNNIPDTGTLNVTVNC

SEQ ID NO: 293 - protein, 62 aa, Arachis hypogaea; identical to SEQ ID NO: 281

SEQ ID NO: 294 - protein, 62 aa, Mimosa pudica
DCINGQFLGHMFQYDVATGDTYDKIASTDFANLTTVEWLQKFNSYAADNIPDTATLNVTVNC

SEQ ID NO: 295 - protein, 62 aa, Chamaecrista fasciculata
DCIEDEFLGYNFLYDVQTGDTYERIARTNFANLTTVDWLQKFNSYPPNNIPDTGTLNVTINC

SEQ ID NO: 296 - protein, 62 aa, Lupinus albus
DCINGEFLGHMFRYDVKTNDTYTSVAETEYANLTNVNWLMKFNNYPASNIPDTGTLNVTVNC

SEQ ID NO: 297 - protein, 62 aa, Pisum sativum
DCINGDFLAHNFSYDVQTGDTYASVAGSNYANLTNVQWLRNFNTYPPNSIPDTGTLNVMINC

SEQ ID NO: 298 - protein, 62 aa, Arachis hypogaea; identical to SEQ ID NO: 280

SEQ ID NO: 299 - protein, 62 aa, Spatholobus suberectus
DCLNGVFLGHTFSFATQHGDTYKVIAEVGFSNLTTEDWVSRVNRYPPNQIPDNVNINVTVNC

SEQ ID NO: 300 - protein, 62 aa, Prosopis alba
KCINGEFLGHTFQYVVETGDTYEKVAVTNYANLTTVDWLRKFNSYPPDNIPDTGTLNVTVNC

SEQ ID NO: 301 - protein, 599 aa, Phaseolus vulgaris
MELKKGLLLLFLLLEYVCCNVEAKCLKGCGAALASYYVSPGISTLDDITHLMKSSVVSNSDDIVSYNKDRIFNKNVLFFYRINIPFPCECIRDEFLGHVFEYSAAAGDTYDSIAKVTYANLTTVELLRRFNSYGQNDIPTNAKVNVTVNCSCGNSQVSQDYGLFITYPLRPGNNLHDIANETQLDAQLLQNYNPGVNFSQESGIVFIPGRGLSRGAAAGISIAGICGLLLLVICIYAKFFQKKEGEKSKLPTMVFSTQYASGSAEYETSGSSGTATATGLTGIMVAKSMEFTYQELAKATNNFSLENKIGQGGFGAVYYAELRGEKTAIKKMDVQASTEFLCELKVLTHVHHLNLVRLIGYCVEGSLFLVYEYIDNGNLGQYLHGIGKDPLPWSSRVQIALDSARGLEYIHEHTVPVYIHRDVKSANILIDKNFRGKVADFGLTKLIEVGGSTLHTRLVGTFGYMPPEYAQYGDVSPKVDVYAFGVVLYELISAKNAVLKTGEYVAESKGLVALFEEALNQSNPSEVIRKLVDPRLGENYPIDSVLKIAQLGRACTRDNPLLRPSMRSIVVALMTLSSPTEDLDDSYENQTLINLLSVR

SEQ ID NO: 302 - protein, 633 aa, Arachis hypogaea
MKLKKSFLLFFLLLECSCFINLESKCLKGCDLAIASYFVYPKVMLGSIASFMHSNVVPNSNVIISYNKDKMPNNLPVSFTRINIPFPCDCINGEFLGHVFEYSAIEGDTYDLIANMRYSDLTTVEILQRFNNYDPNHVPVNAKVNVTVNCSCGNSNVSKDYGLFVTFPLSEGNTLLQIANQTKLDPKLLQGYNPGVNFNQTRGIVFIPGRDQNGVYVPLYPRLAGLAKGVAVGISIAGTSGVLLLLICACVRYFQKKEEEKIKLPTEDFISSSTQVGNASSSGEYETSGSTAASASGLPAIMAAKSMEFSYQELAKATNNFSSDNKIGQGGFGAVYFAELRGQKAAIKKMDVQASTEFLSELKVLTHVHHLNLVRLIGYCVEGSLFLVYEYIENGNLGQYLHGTEREPLAWSTRVQIALDSARGLEYIHEHTVPVYIHRDVKPANILIDKDFRGKVADFGLTKLREVGSSLSLHTRLVGTFGYMPPEYAQYGDVSPKVDVYAFGVVLYELISAKNAVLKTGETVAESSKGLVTLFEEALNKSDPSKAIRKLVDPRLGENYPIDSVLKVAELGRACTRDNPLLRPSMRSVVVALMTLLASSTSIEDCDDNDDDDDDDDDNSYENRTLIDQLSVR

SEQ ID NO: 303 - protein, 631 aa, Arachis hypogaea
MKLKKSFLLFFLLLECSCFINLESKCLKGCDLAIASYFVYPRVKLGSIASFMHSNVVPNSNVIISYNKDKMPNNLPVSFTTINIPFPCDCINGEFLGHVFEYSAIEGDTYYLIANMRYSDLTTVEILQRFNNYDPNHVPVNAKVNVTVNCSCGNSHVSKDYGLFVTFPLSEGNTLLQIANQTKLDPKLLQSYNPGVNFNQTRGIVFIPGRDQNGVYVPLYPRLAGLAKDVAVGISIAGTSGVLLLLICVCVRYFQKKEEEKIKLPTEDFISSSTQDGNASSSGEYETSGSTAASASGLPAIMAAKSMEFSYQELAKATNNFSSDNKIGQGGFGAVYFAELRGQKAAIKKMDVQASTEFLSELKVLTHVHHLNLVRLIGYCVEGSLFLVYEYIENGNLGQYLHGTGREPLAWLTRVQIALDSARGLEYIHEHTVPVYIHRDVKPANILIDKDFRGKVADFGLTKLREVGSSLSLHTRLVGTFGYMPPEYAQYGDVSPKVDVYAFGVVLYELISAKNAVLKTGETVAESSKGLVTLFEEALNKNDPSKAIRKLVDPRLGENYPIDSVLKVAELGRACTRDNPLLRPSMRSVVVALMTLLASSTSIEDCDDNDDDDDDDNSYENRTLIDQLSVR

SEQ ID NO: 304 - protein, 632 aa, Cajanus cajan
MFLSYPMELKKGLLFLLLLECVFCDVESMCVKECDVALASYYILPGYLTVENVTGWLESSVLSNSDVIKSYNKDKIIKDNLPSFDRINVPFPCDCIHEEFLGHVFEYSAAAGDTYDSIAKVTYANLTTVELLTRFNSYGHDIPQNAKINVTVKCSCGNSQVSKDYGLFITYPLRPGNNLHDIANEVHLDAQLLEKYNPGVNFSKDSGIVFIPGRDQNGDYVPLYPRKAGGIKKKISAKDAAVGVSIAGICGLLLLVVCIYVKYLQKKEGEEVKLPTESSMAFSTQDGTASGSSEYETSGSSGPTTASATGLTGIMVAKSMEFSYQELAKATNNFSLENKIGQGGFGAVYYAELRGEKTAIKKMDVQASTEFLCELKVLTHVHHLNLVRLIGYCVEGSLFLVYEYIDNGNLGQYLHGTGKDPLPWSSRVQIALDSARGLEYIHEHTVPVYIHRDVKSANILIDKNFRGKVADFGLTKLIEVGGSTLHTRLVGTFGYMPPEYAQYGDVSPKVDVYAFGVVLYELISAKNAILRTGESVAETKGLVALFEEALNQSNPGEGIRKLVDPRLGENYPIDSVLKIAQLGRACTRDNPLLRPSMRSIVVALMTLSSPTEDCEDGASYENQTLINLLSVR

SEQ ID NO: 305 - protein, 616 aa, Cicer arietinum
MKLKNIFLFFFFMFLECVFFKVESKCVKGCDLALASYYIKPPFEFTNITNFMQSNSDIIISYNKQLVSNNGKLFSFSRINIPFQCECIQGEFLGHMFEYTTNEGDTYDLIANSYYASLTTIDLLQKFNKYDHNQTLPSKVKVNVTVNCSCGNSQISKEYGLFLTYPLRSSDTLQIIAIESKVDEVLIQNYNPNVNFSRGSGIVFIPGRDKNGDYVPLYPRTGLAKGAAVGISMAGIFGFLLFVICIYVKYFQKNEEQNTKLLETSIALSTQSASGSGEYETSGSSGHGTSSAAGLTGIMVAKSTEFSYQELAKATNNFSLDNKIGQGGFGAVYYAELRGEKTAIKKMDVQASTEFLCELKVLTHVHHLNLVRLIGYCVEGSLFLVYEHIDNGNLGQYLHGIGTEPLPWSSRVQIALDSARGLEYIHEHTVPVYIHRDVKSANILIDKNLRGKVADFGLTKLIEVGNSTLHTRLVGTFGYMPPEYAQYGDVSPKIDVYAFGVVIYELISAKNAVLKTGESVAESKGLVALFEEALNKSDPCEGLRKLVDPRLGENYPIDSVLKMAQLGRACTRDNPLLRPSMRSIVVALMTLSSPTEDCDDDTSYENQTLINLLSVR

SEQ ID NO: 306 - protein, 620 aa, Abrus precatorius
MKPANGFLLFLLLLEYVCCNVESKCMKGCHVALASYYVRPKFLSLDNIMRLMQSKILSTSDVIRSYNKDKILNDNVPSFSRVNIPFPCDCIGDEFLGHVFEYSTAAGDTYDLIAKVKYANLTTVELLQRFNSYDQDDIPANSKLNVTVNCYCGNSQISKDYGMFITYPLRPGNTLQDISNETNLDAHLLQSYNPGVNFSSESGIVFIPGRDQNGDYVPLYPRSGLATGAAVGITIAAICGLILLVIFMYVKYFQKKEGEKAKLPSESSVAFSTQDASGSGEYETSGSTGPANASAAGLTGIMVAKSTEFSYQELAKATNNFSLDNKIGQGGFGAVYYAELRGEKTAIKKMDVQASTEFLCELKVLTHVHHLNLVRLIGYCVEGSLFLVYEYIDNGNLGQYLHGTGKDPLPWSSRVQIALDSARGLEYIHEHTVPVYIHRDVKSANILIDKHFRGKVADFGLTKLIEVGSSTLHTRLVGTFGYMPPEYAQYGDVSPKIDVYAFGVVLYELISAKNAVLKTGESVAESKGLVALFEEALNQSNPLEGIHKLVDPRLGENYPIDSVLKIAQLGRACTRDNPLLRPSMRSIVVALMTLASPTEDCDDDTISYENQTLINLLSVR

SEQ ID NO: 307 - protein, 611 aa, Glycine max
MELKKGLLVFFLLLECVCYNVESKCVKGCDVAFASYYVSPDLSLENIARLMESSIEVIISFNEDNISNGYPLSFYRLNIPFPCDCIGGEFLGHVFEYSASAGDTYDSIAKVTYANLTTVELLRRFNGYDQNGIPANARVNVTVNCSCGNSQVSKDYGMFITYPLRPGNNLHDIANEARLDAQLLQRYNPGVNFSKESGTVFIPGRDQHGDYVPLYPRKTGLARGAAVGISIAGICSFLLLVICLYGKYFQKKEGEKTKLPTENSMAFSTQDVSGSAEYETSGSSGTASATGLTGIMVAKSMEFSYQELAKATNNFSLENKIGQGGFGAVYYAELRGEKTAIKKMDVQASTEFLCELKVLTHVHHFNLVRLIGYCVEGSLFLVYEYIDNGNLGQYLHGTGKDPLPWSGRVQIALDSARGLEYIHEHTVPVYIHRDVKSANILIDKNIRGKVADFGLTKLIEVGGSTLHTRLVGTFGYMPPEYAQYGDISPKVDVYAFGVVLYELISAKNAVLKTGESVAESKGLVALFEEALNQSNPSESIRKLVDPRLGENYPIDSVLKIAQLGRACTRDNPLLRPSMRSIVVALMTLSSPTEDCDTSYENQTLINLLSVR

SEQ ID NO: 308 - protein, 618 aa, Glycine max
MELKKWLLFFLLLEYVCCNAESKCVKGCDVALASYYVSPGYLLLENITRLMESIVLSNSDVIIYNKDKIFNENVLAFSRLNIPFPCGCIDGEFLGHVFEYSASAGDTYDSIAKVTYANLTTVELLRRFNSYDQNGIPANATVNVTVNCSCGNSQVSKDYGLFITYLLRPGNNLHDIANEARLDAQLLQSYNPGVNFSKESGDIVFIPGKDQHGDYVPLYPRKTGLATSASVGIPIAGICVLLLVICIYVKYFQKKEGEKAKLATENSMAFSTQDVSGSAEYETSGSSGTASTSATGLTGIMVAKSMEFSYQELAKATNNFSLENKIGQGGFGIVYYAELRGEKTAIKKMDVQASTEFLCELKVLTHVHHLNLVRLIGYCVEGSLFLVYEYIDNGNLGQYLHGTGKDPFLWSSRVQIALDSARGLEYIHEHTVPVYIHRDVKSANILIDKNFRGKVADFGLTKLIEVGGSTLQTRLVGTFGYMPPEYAQYGDISPKVDVYAFGVVLYELISAKNAVLKTVESVAESKGLVALFEEALNQSNPSESIRKLVDPRLGENYPIDSVLKIAQLGRACTRDNPLLRPSMRSIVVALLTLSSPTEDCYDDTSYENQTLINLLSVR

SEQ ID NO: 309 - protein, 621 aa, Lupinus angustifolius
MKLKLVFLLLLKYVCFIVESKCIKGCDLALASYYVPVWPIVSLGNITSFMHSNVLTNPNVVTSYNKDKVFNGDVMLALYRTNVPFPCDCIGGEFLGHVFEYSAVEGDTYGLIAMKRYSNLTTVEILKRFNSYDPNHIPVNAKVNVTVKCSCGNSQISKDYGLFITYPLRPGNNLQELSKETKIDAKLLQSYNPGVNFSQENGIVFIPGKDQNGVYVPLYPRTGGVAKGVAVGISIAATCGLVLLVICIYDRYFKKKEGEKAKLSIENSIGFSTQDAYGSGEYETSGSSVHASALTGIMVAKSLEFSYQELAKATNNFSLDNKIGQGGFGAVYYAELRGEKTAIKKMDVQASSEFLAELKVLTHVHHLNLVRLIGYCVEGSLFLVYEYIDNGNLGQYLHGKGKDPLPWSTRLQIALDSARGLEYIHEHTVPLYIHRDVKSANILIDKNLRGKVADFGLTKLIEVGTSSLHTRLVGTFGYMPPEYAQYGDISPKIDVYAFGVVLYELISAKNAVLKTGETVAESKGLVNLFEEALNQINPLEPLTTLVDPRLGDNYPIQSLLKIAELGRACTRDNPLLRPNMKSIVVALMTLSSSNEDNTTSSYDNQTLINLLLDEGFRGITF

SEQ ID NO: 310 - protein, 624 aa, Lupinus angustifolius
MKLKFVFFLLLECVCFIVESKCIKGCDLALASYYVSVWPSISLGNITNFMHSNVLTNSDVIISYNKGKIFNGDVLLSLTRTNVPFPCDCIGGEFLGHVFQYSSVAGDTYDTIAMKSYSNLTTVEFLKRFNSYDPNHIPVNSKVNVTINCSCGNSLISKDYGLFTTYPLRPGNNLQELSKETNIDAKLLQSYNPGANFSQESRIVFIPGRDQNGVYVPLYPRIGGLARGAAVGISIAATCGLVLLIICIYDRYFKKKEGEKTKLSTEDSIGLSTEDGTGSGSGEYEASGSSGHAVGLTSIMVAKSLEFSYQELAKATNNFSLDNKIGQGGFGAVYYAELRGEKTAIKKMDVQASSEFLAELKVLTHIHHSNLVRLIGYCVEGSLFLVYEYIDNGNLGQYLHGKGRDPLPWSTRLQIALDSARGLEYIHEHTVPLYIHRDVKSANILIDKNLRGKVADFGLTKLIEVGTSSFHTRLVGTFGYMPPEYAQYGDISSKIDVYAFGVVLYELISAKSAILKTGETVSESKGLVTLFEGALNQINPLEALPKLVDPRIGDNYPIESVLKIAQLGRACTRDNPLLRPNMKSIVVALMTLSSSAEHSTSYDNQTLINLLLDEGFREIITPTS

SEQ ID NO: 311 - protein, 617 aa, Pisum sativum
MKLKNGLLLFFMFLDCIFFKVESKCVIGCDIALASYYVMPLVELLNITTFMQSKLVTNSSEVIVRYNRDIVFSNDNLFSYFRINIPFPCECIGGEFLGHVFEYTANEGDTYDLIANTYYASLTTVEVLKKFNSYDPNHIPAKAKVNVTVNCSCGNSQISKDYGLFITYPLRPRDTLEKIASHSKLDEGVIQSYNLGVNFSKGSGIVFFPGRDKNGEYVPLYPRAGLGKGAAAGISIAGIFALLLFVICIYIKYFQKKEEEKTKLPQISTALSAQDASGSGEYETSGSSGHGTGSTAGLTGIMVAKSTEFSYQELAKATNNFSLDNKIGQGGFGAVYYAVLRGEKTAIKKMDVQASTEFLCELQVLTHVHHLNLVRLIGYCVEGSLFLVYEHIDNGNLGQYLHGIDKAPLPWPSRVQIALDSARGLEYIHEHTVPVYIHRDVKSANILIDKNLHGKVADFGLTKLIEVGNSTLHTRLVGTFGYMPPEYAQYGDVSPKIDVYAFGVVLYELISAKNAILKTGESAVESKGLVALFEEALNQIDPLEALRILVDPRLKENYPIDSVLKMAQLGRACTRDNPLLRPSMRSLVVALMTLLSHTDDDDTFYENQSLTNLLSVR

SEQ ID NO: 312 - protein, 618 aa, Vigna angularis
MELRKGLLLLFLLLEYVCCNVEAKCLKGCDLALASYYVSSGLTLDDITHLMKSSVVSNSDDIISYNKDKTFNKNIFLFDRINVPFPCDCIHDEFLGHVFEYSAAEGDTYDSIAKVEYADLTTVELLRRFNSYGQNGIPKNAKVNVTVNCSCGNSQVSQEYGLFITYPLRPDNNLHDIANEAHLDAQLLQNYNPGVNFSKESGIVFIPGRDQFGDYVPLHPRKTGLATGAVAGISIAGICGLLLFIICTYVKFFKKMEGEKPKLPTEKSTAFSIQDASGSADYETSGSSGTATATGLTGIMVAKSMEFTYQELAKATNNFSLENKIGQGGFGAVYYAELRGEKTAIKKMDVQASTEFLCELKVLTHVHHLNLVRLIGYCVEGSLFLVYEHIDNGNLGQYLHGTGKDPLTWSSRVQIALDSARGLEYIHEHTVPVYIHRDVKSANILIDKNFRGKVADFGLTKLIEVGSSTLHTRLVGTFGYMPPEYAQYGDVSPKVDVYAFGVVLYELISAKNAVLKTGEYVAESKGLVALFEEALNQSNPSEAIRKLVDPRLGENYPIDSVLKIAQLGRACTRDNPLLRPSMRSIVVALMTLSSPTEDFDDETASYENQTLINLLSVR

SEQ ID NO: 313 - protein, 618 aa, Vigna radiata var. radiata
MELRKGLLLLFLLLEYVCCNVEAKCLKGCDLALASYYVNRGLSLDNITHLMKSSVVSNSDDIISYNKNKIFNKNVFMFNRYNVPFPCDCIRDEFLGHVFEYSAAEGDTYDSIAKVEYADLTTVELLRRFNSYGQNGIPKNAKVNVTVNCSCGNSQVSQEYGLFITYPLRPDNNLHDIANEAHLDAQLLQNYNPGVNFSKESGIVFIPGRDQFGDYVPLHPRKTGLATGAVAGISIAGICGLLLLVICIYVKFFKKMEGEKPKLPTEKSTASSIQDASGSAEYETSGSSGTATATGLTGIMVAKSMEFTYQELAKATNNFSLENKIGQGGFGAVYYAELRGEKTAIKKMDVQASTEFLCELKVLTHVHHLNLVRLIGYCVEGSLFLVYEHIDNGNLGQYLHGTGKDPLTWSSRVQIALDSARGLEYIHEHTVPVYIHRDVKSANILIDKNFRGKVADFGLTKLIEVGSSTLHTRLVGTFGYMPPEYAQYGDVSPKVDVYAFGVVLYELISAKNAVLKTGEFVAESKGLVALFEEALNQSNPSEAIRKLVDPRLGENYPIDSVLKIAQLGRACTRDNPLLRPSMRSIVVALMTLSSPTEDFDDETASYENQTLINLLSVR

SEQ ID NO: 314 - protein, 618 aa, Vigna unguiculata
MELRKGLLLLFLLLEYVCCNVEAKCLKGCNVALGSYYVNTGMSLDVITPLMKSSVVSNSDDIISYNKDKIFNKNVFYFDRINVPFPCDCISDEFLGHVFEYSAAEGDTYDSIAKVEYADLTTVELLRRFNSYGQNGIPKNAKVNVTVNCSCGNSQVSQDYGLFITYPLRPGNNLHDIANEAHLDAQLLQNYNPGVNFSKESGIVFIPGRDQFGEYVPLHPRNTGLAKGDVAGISIAGICGLLLLVICIYVKFFKKKEGEKPKLPTENSTAFSTQDASGSAEYEISGSSGTTTAAGLTGIMVAKSMEFTYQELAKATNNFSLENKIGQGGFGAVYYAELRGEKTAIKKMDVQASTEFLCELKVLTHVHHLNLVRLIGYCVEGSLFLVYEHIDNGNLGQYLHGTGKDPLPWSSRVQIALDSARGLEYIHEHTVPVYIHRDVKSANILIDKNFRGKVADFGLTKLIEVGGSTLHTRLVGTFGYMPPEYAQYGDVSPKVDVYAFGVVLYELISAKNAVLKTGEFVAESKGLVALFEEALNQSNPSEAIRKLVDPRLGENYPIDSVLKIAQLGRACTRDNPLLRPSMRSIVVALMTLSSPTEDFEDETASYENQTLINLLSVR

SEQ ID NO: 315 - protein, 629 aa, Arachis duranensis
MKLKRSFLLFFLLLECSCFINLESKCLKGCDLAIASYFVYPGVMLGSIASFMHSNVVPNSNVIISYNKDKMPNNLPVSFSRINIPFPCDCINGEFLGHVFEYSAIEGDTYDLIANLRYSDLTTVEILQRFNNYDPNHVPVNAKVNVTVNCSCGNSNVSKDYGLFVTFPLSEGNTLLQIANQTKLDPKLLQSYNPGVNFNQTRGIVFIPARDQNGVYVPLYPRTGLAKGVAVGISIAGTSGVLLLLICACVRYFQKKEEEKIKLPTEDFISSSTQDASSSGEYETSGSTAASASGLPAIMAAKSMEFSYQELSKATNNFSSDNKIGQGGFGAVYFAELRGQKAAIKKMDVQASTEFLSELKVLTHVHHLNLVRLIGYCVEGSLFLVYEYIENGNLGQYLHGTGREPLAWLTRVQIALDSARGLEYIHEHTVPVYIHRDVKPANILIDKDFRGKVADFGLTKLREVGSSLSLHTRLVGTFGYMPPEYAQYGDVSPKVDVYAFGVVLYELISAKNAVLKTGETVAESSKGLVTLFEEALDKSDPSKAIRKLVDPRLGENYSIDSVLKVAELGRACTRDNPLLRPSMRSVVVALMTLLASSTSIENCDDDDDDDDDDDNSYENRTLIDQLSVR

SEQ ID NO: 316 - protein, 630 aa, Arachis ipaensis
MKLKKSFLLFFLLLECSCFINLESKCLKGCDLAIASYFVYPKVMLGSIASFMHSNVVPNSNVIISYNKDKMPNNLPVSFTRINIPFPCDCINGEFLGHVFEYSAIEGDTYDLIANMRYSDLTTVEILQRFNNYDPNHVPVNAKVNVTVNCSCGNSNVSKDYGLFVTFPLSEGNTLLQIANQTKLDPKLLQGYNPGVNFNQTRGIVFIPGRDQNGVYVPLYPRTGLAKGVAVGISIAGTSGVLLLLICACVRYFQKKEEEKIKLPTEDFISSSTQVASSSGEYETSGSTAASASGLPAIMAAKSMEFSYQELAKATNNFSSDNKIGQGGFGAVYFAELRGQKAAIKKMDVQASTEFLSELKVLTHVHHLNLVRLIGYCVEGSLFLVYEYIENGNLGQYLHGTEREPLAWSTRVQIALDSARGLEYIHEHTVPVYIHRDVKPANILIDKDFRGKVADFGLTKLREVGSSLSLHTRLVGTFGYMPPEYAQYGDVSPKVDVYAFGVVLYELISAKNAVLKTGETVAESSKGLVTLFEEALNKSDPSKAIRKLVDPRLGENYPIDSVLKVAELGRACTRDNPLLRPSMRSVVVALMTLLASSTSIEDCDDNDDDDDDDDDNSYENRTLIDQLSVR

SEQ ID NO: 317 - protein, 550 aa, Chamaecrista fasciculata
MKPLLALALLFLLLETAFLNVESMCIKGCDLALASYYIPLFFTLQNLTILLQSKVLSDYQVIASFNKDSIFNGVNIKSYQSINVPFPCDCIDGDFLGHVFEYTIANGDTYERIASRKYAMLTSVELLKKYNNYSDPNHLPINGKLNVTVNCYCGDRQISKDYGLFVTYPLRDGDSLQTIAEKTNLDLGLLERYNQGMNFSQGSGLVFYPGKGLRGSAITGMSIGGMLGSLLVAIYIYLRYYRKKAVKVALTTEDSTDLSTQDASGSAGYDTSGSGNSAAGLKGIVVSKSVEFSYQEIAKATNNFSFDNKIGQGGFGAVYYAELRGEKTAIKKMDIEASQEFLAELKVLTHVHHLNLVSHLSMKGERQCHGLRGCKLLWIQQEVADFGLSKLIEVGNASLNTRLVGTFGYMSPEYAQYGITSPKIDVYAFGVVLYELISAKNAVLKTGECVGVAESKGLVTLFEEALRWPDPIEGLRKLVDPKLGENYPIDSIYKMAQLARACTQEDPQLRPSMRSIVVALMTLSSYGEDCDHVDSNLYDNQTLINMLSER

SEQ ID NO: 318 - protein, 594 aa, Mimosa pudica
MQPKSHNALVLAVFFQILLLETTFLINNVESKCHKGCPLALASYLCHQNITLSNITHLLKSNLVSLDFQIISSYNKEGIVPNNIQFFTRINIPFPCECINNDDFLGHVFEYTISKGDTYHSIATQTYSSLTSVDLLRRFNNYSDPNQLPPNGKLNVTVKCSCGNRQISKDYGLFITYPLGFEDSLESIVNQTGIDALLLQSYNPGANFSQQSGVVFIPGRADQTGNYMPLDYIRSGRLRGTAIAGISVAATFVFLLLAAYVFVRYFRKKENAKLALFSENSAELSSQEGSSGVASTTDLRGIMEEKSMEFSYQEIAKATNNFSSDNRIGQGGFGTVYYAELRGQKTAIKKMDIKASQGFLSELKVLTHVHHLNLCFFHYINVNIYNDFDQEKIYNKIYCLNVLPWSTRVQIALDSARGLEYIHEHTVPTYIHRDVKSLNILIDKTYHAKVVADFGLSKLIEVGNASLNTRRLVGTFGYMSPEYAQYGIQSPKIDVYAFGVVLYELISAKNAVLKITNEFVAESKGLVALFEKCLRRPDAVEDLRNLVDPRLGQNYPIESVYKVQKLFEYESGLDSLNFEILKFFIKNSKRKVVT

SEQ ID NO: 319 - protein, 626 aa, Lupinus albus
MKLKFVFLLLLEYVCFTVESKCIKGCDIALASYYVPVWPTVSLGNITNYMYSNVLTKSNVIISYNKDKVFNGDVMLALYRTNIPIPCDCIGGEFLGHVFEYTAVAGDTYDLIAMKRYSNLTTVEFLKRFNSYDPNHIPVNAKVNVTVNCSCGNSLISKDYGLFITYPLRPGNNLQELSKETNIDAKLLQSYNPSVNFSQENGIVFIPGRDQNGVYVPLYPRTEGLARGVAVGISIAASCGLVLLVICIYDRYFKKKEGEKAKLSIENSLVLSTQDASGSSEYETSGSSVHASGLTGIMVAKSLEFSYQELAKATNNFSLDNKIGQGGFGAVYYAELRGEKTAIKKMDVQASSEFLAELKVLTHVHHLNLVRLIGYCVEGSLFLVYEHIDNGNLGQYLHGKGKDPLPWSTRLQIALDSARGLEYIHEHTVPLYIHRDVKSANILIDKNLRGKVADFGLTKLIEVGTSSLHTRLVGTFGYMPPEYAQYGDISPKIDVYAFGVVLYELISAKNAVLKTGETVAESKGLVSLFEGALNHINPLEALSTLVDPRLGDNYPIESVLKIAQVGRACTRDNPILRPNMKSIVVALMTLSSSTHQDHTSSSSYDHQTLINLLLDEGFRGIITPTF

SEQ ID NO: 320 - protein, 644 aa, Spatholobus suberectus
MFLLFGLRDPMKLKKGLLFFLLLEYVCRSVESKCVKGCDVALASYYVSPGYFPLENITRLMESSVLSNSDVVTSYNKDKIFNDMVQSFVRLNIPFSCGCIGGEFLGHVFEYSAAAGDTYDSIAKVTYANLTTVELLRRFNSYDQNDIPANAKLNVTVNCSCGNSQVSKDYGLFITYPLRPGNNLHDIANETQLDAQLLQSYNPGVNFSQESGIVFIPGRGILSFSHHVHLVHSSLYFDQNGDYVPLYPRKTGLARGAAVGISIAGICGLLLLVIFVYVRYFQNKEGKKDKLPTENSMVFSTQDGTEYETSGSSGLATASAAGLTGIMVAKSMEFSYQELAKATNNFSLENKIGQGGFGAVYYAELGGEKTAIKKMDVQASTEFLCELKVLTHVHHLNLVRLIGYCVEGSLFLVYEYIDNGNLGQYLHGTGKDPLPWSSRVQIALDSARGLEYIHEHTVPVYIHRDVKSANILIDKNLRGKVADFGLTKLIEVGGSTLHTRLVGTFGYMPPEYAQYGDISPKVDVYAFGVVLYELISAKNAVLKTGESVAETKGLVALFEEALSQSNPSEGIRKLVDPRLGENYPVDSVLKIAQLGRACTRDNPLLRPSMRSIVVALMTLSSPTEDCDDDASYENQTLINLLSVR

SEQ ID NO: 321 - protein, 629 aa, Prosopis alba
MQPKSNSLVLVFFLLLLETSLLNNVESKCLQGCPLALASYYAYKNNLGNITKFLRSDLVSDFGVVSSYNEGKVSNNGMYVQSLTRINIPFPCDCINNGDFLGHVFEYTIAEGDTYDSIATQTYSSLTTVDLLRRFNSYKDPNQLPLNGKLNVTVNCSCGDRQISKDYGLFLTYPLRFGDSLESIVDQTGIDATLLQKYNLRVNFSQESGVVFIPGRDQNGNYVPLDPRSRGLSEVAIAGICVGATFVFLLLSAYVFVKHFRRKTAKVALITENSTDLSSNQDGMIITSTNYETSGSSGSASATGLRGIMVGKSMEFSYQEIAKATNNFSSDNKIGQGGFGAVYYAELRGEKTAIKKMDIEASQEFLAELKVLTHVHHLNLVRLIGYCVEGSLFLVYEYINNGNLSQHLRSSELDALPWCTRVQIALDSARGLEYIHEHTVPVYIHRDVKSLNILIDESFHAKVADFGLSKLIEVGNASLNTRLVGTFGYMSPEYAQYGITSPKIDVYAFGVVLYELISAKNAVLKTGEFVAESKGLVALFEKSLGRPDAVEDLRKLVDPRLGQNYPIDSVFKMAQLARACTQDDPQLRPTMRSIVVALMTLSSNADDEDCDVGSAFSDNHTIINLLSGR

SEQ ID NO: 322 - protein, 618 aa, Phaseolus vulgaris
MEGGLGCVLLPLLLFCVVLTAESACKEGCPLALGSYYMWQNSNLTYISQIMASSLLTTADDIVLYNKDTIPNKDSVQAFIRVNVPFPCDCIDGQFLAHTFKYDVQSQDSYEYVARTVYSNLTDVAWLRNFNSYEPDNIPDTATLNVTVNCSCGNSDVADYGLFITYPLRTGETLGSVAAAVSLDSGLLQRYNPGVNFNQGSGLVYIPGKDQNGSYVFLASSSGGLAVGAIAGIVVGVVAVLLLLGVFIYFRRFRKKIQKDELPRDSSALFAQHGKDEASRSSANETLGPGGPAAITGIKVDKSVKFTYEELATATDNFSLANKIGQGGFGSVYYAELRGEKAAIKKMDMQATKEFHAELNVLTRVHHLNLVRLIGYSMEGSLFLVYEYIENGNLSQHLRGSGSREPLPWATRVQIALDSARGLEYIHEHTVPLYIHRDIKSANILIDKNFRGKVADFGLTKLTEVGSSSLPTGRLVGTFGYMPPEYAQYGDVSPKVDVYAFGVVLYELISAKEAIVKTNDSAVDSKGLVALFDGVFGQPDPTEDLCKLVDPRLGDNYPIDSVRKMAQLAKACTQDNPQLRPSMRSIVVALMTLSSTTDEWDVGSFYENQNLVNLMSGR

SEQ ID NO: 323 - protein, 622 aa, Arachis ipaensis
MEPRYGFASVLLQLLLLGCVLYGAESQCSKGCPLALASYYMWTGSNLTYVSQIMKSNVLSDPNGIVNYNKDTIPNKDSVQAFIRVNVPFPCDCINGEFLGHTFKYDIQSGDTYEHVATNNYANLTNVNWLRKFNTYPPNNIPNTGTLNVTVNCSCGNRQVANYGLFITYPLRPGDTLQAVAKNQSVDAFLLQKYNPSVNFNQGSGLVYIPGKDQNGSFVFLSSSSGGLAAGAIAGIVVGIVAGLLLVAVGIYFGYFRKKKMQREELLSQDSKPMFRQDGKDETSRSAAYEAAGPAGPGTITGITVDKSVEFSYEELATATNNFNLANKIGQGGFGAVYYAELRGEKAAIKKMDMQASKEFLAELKVLTRVHHLNLVRLIGYSIEGSLFLVYEYIENGNLSQHLRGSGREPLPWATRVQIALDSARGLEYIHEHTVPVYIHRDIKSANILIDKNYRGKVADFGLTKLTEVGSSSLPTGRLVGTFGYMPPEYAQYGDVSPKVDVYAFGVVLFELISAKEAIVKTSESVADSKGLVALFEGVLSQPDPTEDLCKLVDPRLGENYPIDSVRKMAHLAKACTQDNPQLRPSMRSIVVALMTLSSTTDDWDVGSFYENQNLVNLMSGR

SEQ ID NO: 324 - protein, 622 aa, Arachis duranensis
MEPRHRFVSVLLQLLLLGCVLYGAESQCSKGCPLALASYYMWTGSNLTYVSEIMKSNVLSDPNDIVNYNKDTIPNKDSVQASIRVNVPFPCDCINGEFLGHTFQYDIQSGDTYEHVATNNYANLTNVNWLRKFNSYPPNNIPDTGTLNVTVNCSCGNRQVANYGLFITYPLRPGDTLQAVAKNQSVDAFLLQKYNPSVNFNQGSGLVYIPGKDQNGSFVFLSSSSGGLAAGAIAGIAIGIVAGLLLVAVGIYFGYFRKKKMQREELLSQDSKPMFRQDGKDETSRSAAYEAAGPAGPGTITGITVDKSVEFSYEELATATNNFNLANKIGQGGFGAVYYAELRGEKAAIKKMDMQASKEFLAELKVLTRVHHLNLVRLIGYSIEGSLFLVYEYIENGNLSQHLRGSGREPLPWATRVQIALDSARGLEYIHEHTVPVYIHRDIKSANILIDKNYRGKVADFGLTKLTEVGSSSLPTGRLVGTFGYMPPEYAQYGDVSPKVDVYAFGVVLFELISAKEAIVKTSESVADSKGLVALFEGVLSQPDPTEDLCKLVDPRLGENYPIDSVRKMAHLAKACTQDNPQLRPSMRSIVVALMTLSSTTDDWDVGSFYENQNLVNLMSGR

SEQ ID NO: 325 - protein, 624 aa, Cajanus cajan
MEPRFRFLLILVLLVLVLVIVPLEVESACKQGCPVALGSYYMWSGSKLTYISQIMPSALLTKPEDIVAYNKDTVPNKDSVQAFIRVNVPFPCDCVDQQFLAHTFQYDVQSQDTYDYVARTVFANLTDVAWLRRFNSYAPDNIPDTGTLNVTVNCSCGNSDVGGYGLFVTYPLRPGDTLGSVASSVGLDSGLLQRYNPGVNFNQGTGLVYIPGKDQNGSYVFLSSSSGAGLPGGAIAGIAVGVVAGLLLLGVCLYVGYFRKKKIRKVELPLDSSALFAQDGKDETSRSSANETSGPGGPAAITGITVDKSVEFTYEELATATDNFSLANKIGQGGFGSVYYAELRGEKAAIKKMDMQASKEFLAELKVLTRVHHLNLVRLIGYSIEGSLFLVYEYIENGNLSQHLRGAGSREPLPWATRVQIALDSARGLEYIHEYTVPVYIHRDIKSANILIDKNFRGKVADFGLTKLTEVGSSSLPTGRLVGTFGYMPPEYAQYGDVSPKVDVYAFGVVLYELISAKEAIVKTSESEADSKGLVALFDGVLSQPDPTEDLCKLVDPRLGDNYPIDSVRKMAQLGKACTQDNPQLRPSMRSIVVALMTLSSTTDDWDVGSFYENQNLVNLMSGR

SEQ ID NO: 326 - protein, 622 aa, Cicer arietinum
MEQLRFTSFLFFSSLLFSIPFISESKCTKGCSPALASYYLNSGANLTHISGIFSSSILTKPEDIVDYNQDTIANKDTIIAGKRINIPFPCDCIAGEFLAHTFSYDVQTGDTYETVATNNYANLTNVQWLQRFNSYPANNIPDTGTLNVTVNCSCGNSDVANYGLFLTYPLRPGETLGSVANSSNIDSSLLRSYNPGVNFNQGSGLVFIPGKDQKGNFVFLSSSSGGLGSGVIAGIAVGIVVVLLSLAVAIYFGIFRKKKIQKEELLSRDSTALFSRGRMDENSHGAANVTTRHGVPAAITGITVDKSVEFSYDELAAASDNFSLANKIGQGGFGSVYYAELRGEKAAIKKMDMQASKEFLAELKVLTRVHHLNLVRLIGYSIEGSLFLVYEFIENGNLSQHLRGSGRDPLPWATRVQIALDSARGLEYIHEHTVPVYIHRDIKPANILIDKNFRGKVADFGLTKLTEVGSSSLPTGRLVGTFGYMPPEYAQYGDVSPKVDVYAFGVVLYELISAKEAIVKTNESVAADSKGLVALFEGVLSQPDPTEDLHKLVDPRLGDTYPVDSVRKMAQLAKACTQENPQLRPSMRSIVVALMTLSSSTDDWDVGSFYENQNLVNLMSGR

SEQ ID NO: 327 - protein, 615 aa, Abrus precatorius
MFFFIMLLLFFSLPFTVESKCTEGCPLALASYFLWRGSNLTYVSQIMASNVLTRPEDIVSYNKDTVPNKDSIQALSRVNVPFPCDCINGEFLGYTFKYDVQTGDTYETVAGTNYANLTNVAWLRRFNSYPPNNIPDTGTLNVTVNCSCGMSEVSNYGLFITYPLRPGETLGTVASSVGLDSALLQSYNPSVNFNQGSGLVFIPGKDQNGSYVFLSSSSGGLAGGAVAGIAVGVVVGLLFLGVCIYVGYFRKKKIQKEELLPQESSALFAQNGKDETSRSSGNETAGAGGPAAMTGIAVEKSLEFSYEELATATNNFNMANKIGQGGFGAVYYAELRGEKAAIKKMDMQASKEFLAELKVLTRVHHLNLVRLIGYSIEGSLFLVYEYIENGNLSQHLRGSGRDPLPWATRVQIALDSARGLEYIHEHTVPVYIHRDIKSANILIDRNFRGKVADFGLTKLTEVGSSSLPTGRLVGTFGYMPPEYAQYGDVSPKVDVYAFGVVLYELISAKEAIVKTSESDADSKGLVALFEGVLSQPDPTEGLCKLVDPRLGDNYPIDSVRKMAQLAKACTQDNPQLRPSMRSIVVALMTLSSTTDDWDVGSFYENQNLVNLMSGR

SEQ ID NO: 328 - protein, 618 aa, Glycine max
MEALRLAYLLLPWWLVFSTAESACKEGCGVALGSYYLWRGSNLTYISSIMASSLLTTPDDIVNYNKDTVPSKDIIIADQRVNVPFPCDCIDGQFLGHTFRYDVQSQDTYETVARSWFANLTDVAWLRRFNTYPPDNIPDTGTLNVTVNCSCGNTDVANYGLFVTYPLRIGDTLGSVAANLSLDSALLQRYNPDVNFNQGTGLVYVPGKDQNGSFVRLPSSSGGLTGRAIAGIAVGIVAALLLLGVCIYVGYFRKKIQKDEFLPRDSTALFAQDGKDETSRSSANETSGPGGPAIITDITVNKSVEFSYEELATATDNFSLANKIGQGGFGSVYYAELRGEKAAIKKMDMQASKEFLAELNVLTRVHHLNLVRLIGYSIEGSLFLVYEYIENGNLSQHLRGSGSREPLPWATRVQIALDSARGLEYIHEHTVPVYIHRDIKSANILIDKNFRGKVADFGLTKLTEVGSSSLPTGRLVGTFGYMPPEYAQYGDVSPKVDVYAFGVVLYELISAKEAIVKTNDSVADSKGLVALFDGVLSQPDPTEELCKLVDPRLGDNYPIDSVRKMAQLAKACTQDNPQLRPSMRSIVVALMTLSSTTDDWDVGSFYENQNLVNLMSGR

SEQ ID NO: 329 - protein, 613 aa, Glycine max
MEHSFRLPVFFLLCASIAFSAESKCSRGCDLALASYYLSQGDLTYVSKLMESEVVSKPEDILSYNTDTITNKDLLPASIRVNVPFPCDCIDEEFLGHTFQYNLTTGDTYLSIATQNYSNLTTAEWLRSFNRYLPANIPDSGTLNVTINCSCGNSEVSKDYGLFITYPLRPEDSLQSIANETGVDRDLLVKYNPGVNFSQGSGLVYIPGKDQNAIYVPLHLSSGGLAGGVIAGISIGVVTGLLLLAFCVYVTYYRRKKVWKKDLLSEESRKNSARVKNDEASGDSAAEGGTNTIGIRVNKSAEFSYEELANATNNFSLANKIGQGGFGVVYYAELNGEKAAIKKMDIQATREFLAELKVLTHVHHLNLVRLIGYCVEGSLFLVYEYIENGNLGQHLRKSGFNPLPWSTRVQIALDSARGLQYIHEHTVPVYIHRDIKSENILIDKNFGAKVADFGLTKLIDVGSSSLPTVNMKGTFGYMPPEYAYGNVSPKIDVYAFGVVLYELISGKEALSRGGVSGAELKGLVSLFDEVFDQQDTTEGLKKLVDPRLGDNYPIDSVCKMAQLARACTESDPQQRPNMSSVVVTLTALTSTTEDWDIASIIENPTLANLMSGK

SEQ ID NO: 330 - protein, 608 aa, Lupinus angustifolius
MKPILMFLIMFLLWLLLLSSAESKCTQGCSLALASYYMYSGSTLTSISQVMSSQLLQIPEDIVTYNKDTIPNKDSVQAFIRVNVPFPCDCIDGEFLGHMFQYDVKTGDTYQLVAETEYANLTNIDWLMKFNSYPANNIPDTGTLNVTVNCSCGEKNVSNYGLFITYPLRPGDTLDSVSKSVDLDSGLLQRYNPGVNFNQGSGLVYIPGKDQNGSYVFLNSSSEGLAGGVIAGIVIGVLAGILLLVAGIYVGYFRKKKIQKEELLEQDSKSLFVQNGMDETARTAATTGISVDKSVEFSYEELASATDNFSMANKIGQGGFGVVYYAELRGEKAAIKKMDMQASKEFLAELKVLTHVHHLNLVRLIGYSIEGSLFLVYEFIENGNLSQHLRGSGRDPLPWPARVQIALDSARGLEYIHEHTVPVYIHRDIKSANILIDKNFRGKVADFGLTKLTEVGSSSLPTGRLVGTFGYMPPEYAQYGDVSPKVDVYAFGVVLYELISAKEAIIQANESIADSKGLVALFEGVLNQPDSTEDLCKVVDPRLGDNYPIDSVRKLAQLAKACTQDNPQLRPSMRSIVVALMTLSSTTDDWDVGSFYENQNLVNLMSGR

SEQ ID NO: 331 - protein, 610 aa, Lupinus angustifolius
MEPIFWFLIKLSPLFFLCSNAESKCTQGCPIALASYYMLSGSNLTYISQIMSSHVLHSPEDIVSYNKDKVQPFTRVNVPFPCDCIKGEFLGHMFQYVVQTGDTYETVAGTNYANLTNVEWLRRFNTYLPDNISSTGMLNVTVNCSCGNSDVSDYELFITYPLRPGETLGSVAKSVKLDSGLLQRYNPSVNFNQGSGLVYIPGKDQNGSYVFLSSSSGGLAGGAIAGIAVGVVAGILLLVVCIYVGCFRKKKIQKEEVVRPDSKSHSVPDGMDEISLVAAYETSRPRGSAAIAGISMDKSVEFSYEELASATNNFSVANKIGQGGFAVVYYAELRGEKAAIKKMDMQASKEFLAELNVLTHVHHLNLVRLIGYSIKGSLCLVYEFIENGNLSQHLHGSGREPLPWTIRVQIALDSARGLEYIHEHTMPIYIHRDIKSANILIDKNFRGKVADFGLAKLAEVGSSLRPTVRLVGTFGYMPPEYAQYGDVSPKVDVYAFGVVLYELISAKEAIIQSIVDSKGLVHWFKEVLSQPHSTEDLCKLVDPKLGDNYPIDSVLKLAQLAKACTQHNPQLRPSMRSIVVALMTLSSTTDDWDVGSFYENQNLVNLMSGK

SEQ ID NO: 332 - protein, 619 aa, Vigna angularis
MEPRLGVLLLPLVLFSLVLAAESACKKGCSLALGSYYMWSGSNLTYISEVMSSSLLTTPDDIVLYNKDTIPNKDSVQAFIRVNVPFPCDCIDGQFLGHTFHYDVQTQDTYEQVARTVFSNLTDVTWLRRFNSYEPDNIPDTGTLNVTVNCSCGNTDVADYGLFVTYPLRTGETLGSVASDVSLDSGLLQRYNPDVNFNQGSGLVYIPGKDQNGSYVVLPSSSGAGLAGGAIAGIAVGVVAVLLVIGVVIYFRIFRKKIKKEELSRDSSALFAQDGKDEASRSSAHETLRPGGPTAITGIKVDKSVEFTYEELATATDNFSLANKIGQGGFGSVYYAKLRGEKAAIKKMDMQASKEFLAELKVLTRVHHLNLVRLIGYSIEGSLFLVYEYIENGNLSQHLRGSGSREPLPWATRVQIALDSARGLEYIHEHTVPVYIHRDIKSANILIDKNFRGKVADFGLTKLTEVGSSSLPTGRLVGTFGYMPPEYAQYGDVSPKVDVYAFGVVLYELISAKEAIVKTNDSVTDSKGLVALFEGVLGQPDNTEDLCKLVDPRLGDNYPVDSVRKMAQLAKACTQDNPQLRPSMRSIVVALMTLSSTTDEWDVGSFYENQNLVNLMSGR

SEQ ID NO: 333 - protein, 618 aa, Vigna radiata
MEPRLGFLLLPLVLFSLVLAAESACKQGCPLALGSYYMWSGSNLTYISEVMSSSLLTTPDDIVLYNKDTIPNKDSVQAFIRVNVPFPCDCIDGQFLAHTFQYDVQTQDTYEQVARVVFSNLTDVTWLRRFNTYEPDNIPDTGTLNVTVNCSCGNTDVADYGLFITYPLRTGETLGSVASDVSLDSGLLQRYNPDVNFNQGSGLVYIPGKDQNGSYVFLPSSSGGLAGGAIAGIAVGVVAVLLVLGVVIYFRIFRKKIKKEELSRDSSALFAQDGKDEASRSSAHETLGPGGPTAITGIKVDKSVEFTYEELATATDNFSLANKIGQGGFGSVYYAELRGEKAAIKKMDMQASKEFLAELKVLTRVHHLNLVRLIGYSIEGSLFLVYEYIENGNLSQHLRGSGSREPLPWATRVQIALDSARGLEYIHEHTVPVYIHRDIKSANILIDKNFRGKVADFGLTKLTEVGSSSLPTGRLVGTFGYMPPEYAQYGDVSPKVDVYAFGVVLYELISAKEAIVKTNDSATDSKGLVALFDGVLGQPDNTEDLIKLVDPRLGDNYPVDSVRKMAQLAKACTQDNPQLRPSMRSIVVALMTLSSTTDEWDVGSFYENQNLVNLMSGR

SEQ ID NO: 334 - protein, 618 aa, Vigna unguiculata
MEARLGFVVVPLVLFCLVLAAESACRQGCSLALGSYYMWSGSNLTYISEVMSSPLLTTPDDIVLYNKDTIPNKDSVQAFIRVNVPFPCDCIDGQFLAHTFQYDVQTQDTYEYVARTVFSNLTDVTWLRRFNSYEPNNIPDTGTLNVTVNCSCGNTDVADYGLFITYPLRTGETLGSVAADVSLDSGLLQRYNPDVNFNQGSGLVYIPGKDQNGSYVFLPSSSGGLAGGAIAGIAVGVVAVLLVLGVVIYFRIFRMKIQKEELSRDSSALFAQDGKDEASRSSAHETLGPGGPAAITGIKVDKSVEFTYEELATATDNFSLANKIGQGGFGSVYYAELRGEKAAIKKMDMQASKEFLAELKVLTRVHHLNLVRLIGYSIEGSLFLVYEYIENGNLSQHLRGSGSREPLPWATRVQIALDSARGLEYIHEHTVPVYIHRDIKSANILIDKNFRGKVADFGLTKLTEVGSSSLPTGRLVGTFGYMPPEYAQYGDVSPKVDVYAFGVVLYELISAKEAIVKTNDSVTDSKGLVALFDGVLGQPDPTEDLCKLVDPRLGDNYPIDSVRKMAQLAKACTQDNPQLRPSMRSIVVALMTLSSTTDEWDVGSFYENQNLVNLMSGR

SEQ ID NO: 335 - protein, 627 aa, Mimosa pudica
  VARIANT 222, 223, 224: Xaa = Any Amino Acid
MEPRFGFLLFMLASIFVSSKSQCSESCDTALASYYVKNGTNLTFISKLMTSKLVSTPDDIVSYNKDKIPNKDSLSASIRINIPFPCDCINGQFLGHMFQYDVATGDTYDKIASTDFANLTTVEWLQKFNSYAADNIPDTATLNVTVNCSCGNRDVSDDYGLFITYPLLPGETLQSVASEVGFNDTGLLQRYNPSVNFNQGSGLVFLPGKDQNGTYVPLHIRXXXGLSTGAIVGICIGVVAGLLLLAVGIYFGYFKKKKTSKVKVLSQGLTSQDRRGKASDTTTGNDEYGTSVSGGPVSSIAGMTNITVDKSVEFSYEELATATNNFNMANMIGQGGFGAVYYAELRGEKAAIKKMDMQATKEFLAELKVLTNVHHLNLVRLIGYCVEDSLFLVYEYIENGNLSQHLRGSGPGRDPLPWSTRVQIALDSARGLEYIHEHTVPVYIHRDIKPANILIDKNFRGKVADFGLAKLTEVGSGTLPTGRLVGTFGYMPPEYAQYGDVSPKIDVYAFGVVLYELISAKEAIIKINESITDSKGLVSMVNGVLNQPNPMEDLRKLVDPRLGDDYSMDSVFKVAQLAKACTQDNPQLRPSMRSIVVALMTLSSATEDWDVGSFYQNPALMNLMSGR

SEQ ID NO: 336 - protein, 618 aa, Chamaecrista fasciculata
  VARIANT 215, 216, 217: Xaa = Any Amino Acid
MEPRFGFPVFFFFFFFSLTSIFLGAESKCSETCNLALASYYIQDGSNLTYISTILKSQLVSSPDDIVSYNKDKIPNKDSVPSDIRLNVPFPCDCIEDEFLGYNFLYDVQTGDTYERIARTNFANLTTVDWLQKFNSYPPNNIPDTGTLNVTINCSCGNRDVSKDYGLFITYPLMPGQTLQSVAQEVNLDTGLLQRYNPSVNFNQGSGLVYIPGKXXXGLGVGAIVGISIGVVAGVLLLAGYIYIRYFQKKKKEEVQLLSIYPNGHSSQPRRDATSGNAEYGTSGSVSPAVGGVAGITGITVDKSVEFSYEELATATNNFNIANKIGQGGFGAVYYAELRGEKAAIKKMDMQATREFLAELKVLTHVHHLNLVRLIGYCVESSLFLVYEYIENGNLSQHLRSAGRDPLPWSNRVQIALDSARGLEYIHEHTVPVYIHRDIKSANILIDKNFHGKVADFGLTKLTEVGSSTNPTGRLVGTFGYMPPEYAQYGEVSPKVDVYAFGVVLYELISAKEAIIKTAESITDSKGLVALFEGVLNLPDPTEDLRKLVDPRLGDDYPIDSVRKMAILAKACTQDNPQLRPTMRSIVVALMTLSSTTEDWDVGSFYENPALLNLMSGR

SEQ ID NO: 337 - protein, 614 aa, Lupinus albus
MKPILMFLIIFFLLLLLLSSAESKCKQGCSLALASYYMYSGSTLTSISQVMSSQLLTVPEDIVTYNKDTIPNKDSVQAFIRVNVPFPCDCINGEFLGHMFRYDVKTNDTYTSVAETEYANLTNVNWLMKFNNYPASNIPDTGTLNVTVNCSCGESSVSNYGLFITYPLRPGDTLDSVSKSVNLDSGLLQSYNPGVNFNQGSGLVYIPGKDQNGSYVFLNPSSGGLAGGAIAGIVIGVLAGILLLVVCIYVGYFRKKKIQKDELLGQDSKSLFAQDGMDETTRTAAPGGPAAITGISVDKSVEFSYEELASATNNFSMANKIGQGGFGVVYYAELRGEKAAIKKMDMQASKEFLAELKVLTHVHHLNLVRLIGYSIEGSLFLVYEFIENGNLSEHLRGSARDPLPWPTRVQIALDSARGLEYIHEHTVPVYIHRDIKSANILIDKNFRGKVADFGLTKLTEVGSSSLPTGRLVGTFGYMPPEYAQYGDVSPKVDVYAFGVVLYELISAKEAIIQASESIADSKGLVALFEGVLNQPDSTEDLCKLVDSRLGDNYPIDSVRKLAQLGKACTQDNPQLRPSMRSIVVALMTLSSTTDEWDVASFYENQNLVNLMSGR

SEQ ID NO: 338 - protein, 614 aa, Pisum sativum
MKQQHRFTFFISLPLFISLLASIPTTTQSKCTKGCSLALANFYLASGTNLTYVAGILKSPILTKPEDIVDYNRDTVPNKDIILGGERVNIPFPCDCINGDFLAHNFSYDVQTGDTYASVAGSNYANLTNVQWLRNFNTYPPNSIPDTGTLNVMINCSCGDREIADYGLFVTYPLRPGETLGSVANSTKLDSALLQRYNPGVNFNQGSGLVFIPGKDKNGSYVFLDTSSGGLAGGAIAGIAVGIVVLLLLAAGVYFGYFRKKKIQKENSLSRDSTSLFPQDGKDETSRNAVITGITVDKSVEFSYDELAAASDNFSMANKIGQGGFGSVYYAELRGEKAAIKKMDMQATKEFLAELNVLTRVHHLNLVRLIGYSIEGSLFLVYEYIENGNLSQHLRGSGRDPLPWATRVQIALDSARGLEYIHEHTVPVYIHRDIKPANILIDKNFRGKVADFGLTKLTEVGSSSLPTGRLVGTFGYMPPEYAQYGDVSPKVDVYAFGVVLYEIISAKEAIVKTSESVAADSKGLVSMFEGVLSQPDPSEDLRKIVDPRLGDNYPVDSVRKMAQLAKACTQENPQLRPSMRSIVVALMTLSSTTDDWDIGSFYENQNLVNLMSGR

SEQ ID NO: 339 - protein, 622 aa, Spatholobus suberectus
MTTNPNRKAKTAHVFLLFLLLIITRVRGSCFTGCNLALASYYIWNGTNLTYISNLFGRPTSEILKYNPSVENPDVIQSQTRINVPFTCDCLNGVFLGHTFSFATQHGDTYKVIAEVGFSNLTTEDWVSRVNRYPPNQIPDNVNINVTVNCSCGDRHVSKDYGLFATYPLRVGDNLHRIAAESGVPAELLLRYNPTSDFSAGNGLVFVPAKDEHGNFPPMQRGSGISSGAIAGIAVGGAVGILLLALILYVGLYRRKKVAEVSLLPVPEASEDQCSPLRHGIGCGSSLDKASESSVVSSPRLTGITVDKSVEFSYQELAKATDDFSVANIIGKGGFGSVYYAELRNEKAAIKKMDMQASNEFLAELKVLTHVHHLNLVRLIGYCVEGSLFLVYEYIENGNLSQHLRGSGRDPLTWAARVQIALDAARGLEYIHEHTVPVYIHRDIKSANILIDKNFRGKVADFGLTKLTEYGSSSLQTRLVGTFGYMPPEYAQYGEVSLKIDVYAFGVVLYELISGKAAIVKTNEPENESKGLVGLFEEALGLSEPKEDLRQLVDPKLGDSYPLDSVFKVSQLAKACTHENPQLRPSMRSIVVALMTLSSATEDWDVGSFYENQALVHLMSGR

SEQ ID NO: 340 - protein, 627 aa, Prosopis alba
MELRFEFLVLFFFSSLASIFVIAKAQCSETCDFALGSYYVRNGSNLTYVSKVMKSQLLSTPDDIVNYNKDKIPNKDSVPALTRVNVPFPCKCINGEFLGHTFQYVVETGDTYEKVAVTNYANLTTVDWLRKFNSYPPDNIPDTGTLNVTVNCSCGNSDVSKDYGLFITYPLRPGQTLQSVAGEAGLDTGLLQRYNPSVNFNQGSGLVYIPGKDQNGTFVPLLSRKAGGLATGAIVGISIGVVAGLLLLAVGIYIGYSRKKKAHKVKLLSQESKGLTSQDRRDTTSGNGGNGTSGSGGPVAPIAGIAGITVDKSVEFSYEELATATNNFNMANMIGQGGFGAVYYAELGGEKAAIKKMDMQATREFLAELKVLTNVHHLNLVRLIGYCVEDSLFLVYEYIENGNLSQHLRSSGRDPLPWSTRVQIALDSARGLEYIHEHTVPVYIHRDIKSANILIDKNFRGKVADFGLAKLTEVGSSTLPTGRLVGTFGYMPPEYAQYGDVSPKIDVYAFGVVIYELISAKEAIIKINESITDSKGIVSLFDGVLNQPNPTEDLRKLVDPRLGDDYPIDSVHKMAQLAKACTQDNPQLRPSMRSIVVALMTLSSATEDWDVGSFYENPALMKLMSGR

SEQ ID NO: 341 - protein, 6 aa, Solanum lycopersicum
RGSNLT

1. A method of making a modified plant LysM receptor polypeptide comprising generating a nucleic acid encoding a wild-type plant LysM receptor polypeptide that comprises a DNA molecule encoding a modified plant LysM receptor polypeptide comprising a LysM1 domain comprising a first motif and a second motif, wherein the first motif and/or the second motif are modified as compared to the amino acid sequences of the corresponding wild-type plant LysM receptor polypeptide, and wherein the encoded modified plant LysM receptor polypeptide has higher affinity, higher selectivity, and/or altered specificity for one or more Nod factors produced by nitrogen-fixing bacteria or by mycorrhizal fungi than an unmodified plant LysM receptor polypeptide.

2. The method of claim 1, wherein the first motif corresponds to amino acids 42-48 of SEQ ID NO: 162 when the plant LysM receptor polypeptide amino acid sequence is aligned to SEQ ID NO: 162 and the second motif corresponds to amino acids 75-80 of SEQ ID NO: 162 when the plant LysM receptor polypeptide amino acid sequence is aligned to SEQ ID NO: 162; or wherein the first motif corresponds to amino acids 44-49 of SEQ ID NO: 164 when the plant LysM receptor polypeptide amino acid sequence is aligned to SEQ ID NO: 164 and the second motif corresponds to amino acids 76-81 of SEQ ID NO: 164 when the plant LysM receptor polypeptide amino acid sequence is aligned to SEQ ID NO: 164.

3. The method of claim 1, wherein the first motif is modified by substituting at least one, at least two, or at least three amino acid residues in the first motif with corresponding amino acid residues that are different in a third motif; wherein the second motif is modified by substituting at least one, at least two, or at least three amino acid residues in the second motif with corresponding amino acid residues that are different in a fourth motif; and/or wherein the first motif is modified by substituting the first motif with a third motif, and/or wherein the second motif is modified by substituting the second motif with a fourth motif.

4. The method of claim 3, wherein the third motif and the fourth motif have different affinities, selectivities, and/or specificities for oligosaccharides than the first motif and the second motif.

5. The method of claim 4, wherein the third motif and the fourth motif are from a second plant LysM receptor polypeptide having the different affinity, selectivity and/or specificity for oligosaccharides and the third motif corresponds to amino acids 42-48 of SEQ ID NO: 162 when the second plant LysM receptor polypeptide amino acid sequence is aligned to SEQ ID NO: 162 and the fourth motif corresponds to amino acids 75-80 of SEQ ID NO: 162 when the second plant LysM receptor polypeptide amino acid sequence is aligned to SEQ ID NO: 162; or wherein the third motif and the fourth motif are from a second plant LysM receptor polypeptide having the different affinity, selectivity and/or specificity for oligosaccharides and the third motif corresponds to amino acids 44-49 of SEQ ID NO: 164 when the second plant LysM receptor polypeptide amino acid sequence is aligned to SEQ ID NO: 164 and the fourth motif corresponds to amino acids 76-81 of SEQ ID NO: 164 when the second plant LysM receptor polypeptide amino acid sequence is aligned to SEQ ID NO: 164.

6. The method of claim 1, wherein the modified plant LysM receptor polypeptide further comprises a fifth motif in the LysM1 domain, wherein the fifth motif is modified.

7. The method of claim 6, wherein the fifth motif corresponds to amino acids 56-65 of SEQ ID NO: 162 when the plant LysM receptor polypeptide amino acid sequence is aligned to SEQ ID NO: 162.

8. The method of claim 6, wherein the fifth motif is modified by substituting at least one, at least two, or at least three amino acid residues in the fifth motif with corresponding amino acid residues that are different in a sixth motif; and/or wherein the fifth motif is substituted with a sixth motif.

9. The method of claim 8, wherein the sixth motif has a different specificity for oligosaccharides than the fifth motif.

10. The method of claim 8, wherein the sixth motif is from a second plant LysM receptor polypeptide having the different specificity for oligosaccharides and the sixth motif corresponds to amino acids 56-65 of SEQ ID NO: 162 when the second plant LysM polypeptide amino acid sequence is aligned to SEQ ID NO: 162.

11. The method of claim 1, wherein the modified plant LysM receptor polypeptide binds one or more Nod factors produced by nitrogen-fixing bacteria or by mycorrhizal fungi with higher affinity, higher selectivity, and/or altered specificity than an unmodified plant LysM receptor polypeptide.

12. The method of claim 1, wherein the modified plant LysM receptor polypeptide further comprises a LysM2 domain modified to comprise a hydrophobic patch on the surface of the LysM2 domain, wherein the modified plant LysM receptor polypeptide has enhanced affinity, selectivity, and/or specificity for one or more Nod factors as compared to the unmodified plant LysM receptor polypeptide.

13. The method of claim 12, wherein the hydrophobic patch was generated by deleting at least one non-hydrophobic amino acid residue, substituting at least one amino acid residue with a more hydrophobic amino acid, or combinations thereof.

14. The method of claim 1, wherein the nucleic acid is generated by site-directed mutagenesis, by chemical synthesis, by genetic editing, or by genetic engineering.

15. The method of claim 1, wherein the nucleic acid is an endogenous plant gene in a plant cell.

16. A method of generating a modified plant LysM receptor polypeptide comprising:
(a) providing a heterologous Nod factor LysM receptor polypeptide model comprising a structural model, a molecular model, a surface characteristics model, and/or an electrostatic potential model of a LysM1 domain, a LysM2 domain, a LysM3 domain, any combination thereof, or the ectodomain of the heterologous Nod factor LysM receptor polypeptide having selectivity for a beneficial nitrogen-fixing bacteria or a beneficial mycorrhizal fungus and an unmodified endogenous LysM receptor polypeptide;
(b) identifying a first motif, a second motif, and/or optionally a fifth motif for modification in the unmodified endogenous LysM receptor polypeptide by comparing a LysM1 domain of the unmodified endogenous LysM receptor polypeptide with the corresponding LysM1 domain of the heterologous Nod factor LysM receptor polypeptide model;
(c) modifying the first motif by substituting at least one, at least two, or at least three amino acid residues in the first motif with corresponding amino acid residues that are different in a third motif, modifying the second motif by substituting at least one, at least two, or at least three amino acid residues in the second motif with corresponding amino acid residues that are different in a fourth motif, and/or optionally modifying the fifth motif by substituting at least one, at least two, or at least three amino acid residues in the fifth motif with corresponding amino acid residues that are different in a sixth motif, wherein the third motif, the fourth motif, and the sixth motif have different affinities, selectivities, and/or specificities for oligosaccharides than the first motif, the second motif, and the fifth motif; and
(d) generating the modified endogenous LysM receptor polypeptide wherein the first motif, the second motif, and/or optionally the fifth motif have been substituted with corresponding amino acid residues from the third motif, the fourth motif, and/or optionally the sixth motif.

17. A genetically altered plant comprising the modified plant LysM receptor polypeptide encoded by the nucleic acid of claim 1.

18. The plant of claim 17, wherein the plant is selected from the group consisting of cassava, corn, cowpea, rice, barley, wheat, Trema spp., apple, pear, plum, apricot, peach, almond, walnut, strawberry, raspberry, blackberry, red currant, black currant, melon, cucumber, pumpkin, squash, grape, bean, soybean, pea, chickpea, cowpea, pigeon pea, lentil, Bambara groundnut, lupin, pulses, Medicago spp., Lotus spp., forage legumes, indigo, legume trees, and hemp.

19. The genetically altered plant of claim 17, wherein the nucleic acid is a transgene.

20. The genetically altered plant of claim 17, wherein the nucleic acid is an endogenous plant LysM receptor gene.
